(19) United States
(12) Patent Application Publication
(10) Pub. No.: US 2004/0014099 A1
(43) Pub. Date: Jan. 22, 2004

(54) Susceptibility gene for human stroke; methods of treatment

(75) Inventors: Solveig Gretarsdottir, Reykavik (IS); Sif Jonsdottir, Reykjavik (IS); Sigridur Th. Reynisdottir, Reykjavik (IS); Gudmar Thorleifsson, Reykjavik (IS); Jeffrey R. Gulcher, Chicago, IL (US)

Correspondence Address: HAMILTON, BROOK, SMITH & REYNOLDS, P.C., 530 VIRGINIA ROAD, P.O. BOX 9133, CONCORD, MA, 01742-9133, US

(73) Assignee: deCODE genetics ehf., Reykjavik (IS)

(21) Appl. No.: 10/419,723

(22) Filed: Apr. 18, 2003

Related U.S. Application Data
(63) Continuation-in-part of application No. 10/255,120, filed on Sep. 25, 2002.
Application No. 10/255,120 is a continuation-in-part of application No. 10/067,514, filed on Feb. 4, 2002, now abandoned.
Application No. 10/067,514 is a continuation-in-part of application No. 09/811,352, filed on Mar. 19, 2001, now abandoned.

(51) Int. Cl. C12Q 1/68

(52) U.S. Cl. 435/6

(57) ABSTRACT

A role of the human PDE4D gene in stroke is disclosed. Methods for diagnosis, prediction of clinical course and treatment for stroke using polymorphisms in the PDE4D gene are also disclosed.

### RELATED APPLICATIONS

[0001] This application is a continuation-in-part of U.S. application Ser. No. 10/255,120, filed Sep. 25, 2002, which is a continuation-in-part of U.S. application Ser. No. 10/067,514, filed Feb. 4, 2002, which is a continuation-in-part of U.S. application Ser. No. 09/811,352, filed Mar. 19, 2001. The entire teachings of the above applications are incorporated herein by reference.

### BACKGROUND OF THE INVENTION

[0002] Stroke is a common and serious disease. Each year in the United States more than 600,000 individuals suffer a stroke and more than 160,000 die from stroke-related causes (Sacco, R. L. et al., Stroke 28, 1507-17 (1997)). In western countries stroke is the leading cause of severe disability and the third leading cause of death (Bonita, R., Lancet 339, 342-4 (1992)). The lifetime risk of those who reach the age of 40 exceeds 10%.

[0003] The clinical phenotype of stroke is complex but is broadly divided into ischemic (accounting for 80-90%) and hemorrhagic stroke (10-20%) (Caplan, L. R. Caplan 's Stroke: A Clinical Approach, 1-556 (Butterworth-Heinemann, 2000)). Ischemic stroke is further subdivided into large vessel occlusive disease (referred to here as carotid stroke), usually due to atherosclerotic involvement of the common and internal carotid arteries, small vessel occlusive disease, thought to be a non-atherosclerotic narrowing of small end-arteries within the brain, and cardiogenic stroke due to blood clots arising from the heart usually on the background of atrial fibrillation or ischemic (atherosclerotic) heart disease (Adams, H. P., Jr. et al., Stroke 24, 35-41 (1993)). Therefore, it appears that stroke is not one disease but a heterogeneous group of disorders reflecting differences in the pathogenic mechanisms (Alberts, M. J. Genetics of Cerebrovascular Disease, 386 (Futura Publishing Company, Inc., New York, 1999); Hassan, A. & Markus, H. S. Brain 123, 1784-812 (2000)). However, all forms of stroke share risk factors such as hypertension, diabetes, hyperlipidemia, and smoking (Sacco, R. L. et al., Stroke 28, 1507-17 (1997); Leys, D. et al., J. Neurol. 249, 507-17 (2002)). Family history of stroke is also an independent risk factor suggesting the existence of genetic factors that may interact with environmental factors (Hassan, A. & Markus, H. S. Brain 123, 1784-812 (2000); Brass, L. M. & Alberts, M. J. Baillieres Clin. Neurol. 4, 221-45 (1995)).

[0004] The genetic determinants of the common forms of stroke are still largely unknown. There are examples of mutations in specific genes that cause rare Mendelian forms of stroke such as the Notch3 gene in CADASIL (cerebral autosomal dominant arteriopathy with subcortical infarctions and leukoencephalopathy) (Tournier-Lasserve, E. et al., Nat. Genet. 3, 256-9 (1993); Joutel, A. et al., Nature 383, 707-10 (1996)), Cystatin C in the Icelandic type of hereditary cerebral hemorrhage with amyloidosis (Palsdottir, A. et al., Lancet 2, 603-4 (1988)), APP in the Dutch type of hereditary cerebral hemorrhage (Levy, E. et al., Science 248, 1124-6 (1990)) and the KRIT1 gene in patients with hereditary cavernous angioma (Gunel, M. et al., Proc. Natl. Acad. Sci. USA 92, 6620-4 (1995); Sahoo, T. et al., Hum. Mol. Genet. 8, 2325-33 (1999)). None of these rare forms of stroke occur on the background of atherosclerosis, and therefore, the corresponding genes are not likely to play roles in the common forms of stroke which most often occur with atherosclerosis.

[0005] It is very important for the health care system to develop strategies to prevent stroke. Once a stroke happens, irreversible cell death occurs in a significant portion of the brain supplied by the blood vessel affected by the stroke. Unfortunately, the neurons that die cannot be revived or replaced from a stem cell population. Therefore, it is much better to prevent strokes from happening in the first place. Although we already know of certain clinical risk factors that increase stroke risk (listed above), there is an unmet medical need to define the genetic factors involved in stroke to more precisely define stroke risk. There is also a great need for therapeutic agents whose use prevents the first stroke or further strokes in individuals who have suffered a previous stroke or transient ischemic attack.

### SUMMARY OF THE INVENTION

[0006] We have mapped a gene conferring susceptibility to ischemic stroke to chromosome 5q12 in the Icelandic population and we report herein the identification of phosphodiesterase 4D (PDE4D) as the gene at 5q12 contributing to the risk of ischemic stroke. This locus was extensively fine mapped and tested for association to stroke. The strongest association was within the PDE4D, especially to the two major subtypes of ischemic stroke, carotid and cardiogenic stroke. We have found variation in the PDE4D that more than doubles the risk for cardiogenic and carotid stroke, two of the most common forms of ischemic stroke. We have shown that there are at least 9 isoforms of PDE4D at the mRNA level and the protein level. The basis for these isoforms is the use of alternative 5 prime exons that are alternatively spliced into a common set of exons defining the catalytic domain as well as, in the case of the long forms, a set of exons defining a common core in the regulatory domain. A significant disregulation of multiple PDE4D isoforms in stroke patients was also observed. The major pathological process underlying ischemic stroke is atherosclerosis. Our results indicate that atherosclerosis is a cAMP disease resulting from disregulation of its levels within the vasculature.

[0007] In one aspect, the invention relates to methods of diagnosing a predisposition to stroke. The methods of diagnosing a predisposition to stroke in an individual include detecting the presence of a polymorphism in PDE4D, as well as detecting alterations in expression of an PDE4D polypeptide or isoform, such as the presence or relative expression of different splicing variants of PDE4D polypeptides. For example, it may be that the ratio of certain splice variants could be used as a diagnostic marker for stroke predisposition. Also an abnormal splice form can be detected (that is one that is not normally expressed but is created from a DNA sequence mutation that leads to an abnormal splice form to be created from the primary transcript) may be created from mutations in the PDE4D gene. For example, new splice sites might be created from a single base substitution within an intron that is inappropriately used as a splice acceptor or donor site, resulting in an abnormal message which is likely to have a premature stop codon leading to a truncated form of PDE4D protein. The alterations in expression can be quantitative, qualitative, or both quantitative and qualitative. The methods of the invention allow the accurate diagnosis of stroke at or before disease onset, thus reducing or minimizing the debilitating effects of stroke. In a preferred embodiment, predisposition to stroke or susceptibility to stroke can be assessed by determining PDE4D isoform levels in the individual compared to control levels, wherein a difference in isoform expression is indicative of predisposition or susceptibility to stroke. Preferably, the level of expression of PDE4D7A and/or PDE4D9 is assessed.

[0008] The invention additionally relates to an assay for identifying agents that alter (e.g., enhance or inhibit) the activity or expression or transcription of one or more PDE4D polypeptides or isoforms. Such an assay may also identify agents that alter the relative expression of one or more PDE4D isoforms with respect to other isoforms at either the mRNA level or polypeptide level. For example, a cell, cellular fraction, or solution containing a PDE4D polypeptide or a fragment or derivative thereof, can be contacted with an agent to be tested, and the level of PDE4D polypeptide expression or activity can be assessed. Alternatively, a cell, or cell with artificial DNA construct with part or all of the PDE4D gene with or without a reporter gene can be used to identify agents that may directly affect transcription at one or more of the many alternative PDE4D promoters upstream of the alternative 5 prime exons or splicing efficiency of the primary transcript to one or more mRNA isoforms. The activity or expression of more than one PDE4D polypeptides can be assessed concurrently (or the corresponding reporter gene activity) (e.g., the cell, cellular fraction, or solution can contain more than one type of PDE4D polypeptide, such as different splicing variants, and the levels of the different polypeptides or splicing mRNA variants can be assessed).

[0009] Agents that enhance or inhibit PDE4D mRNA or polypeptide expression or activity are also included in the current invention, as are methods of altering (enhancing or inhibiting) PDE4D mRNA or polypeptide expression or activity by contacting a cell containing PDE4D gene, mRNA, and/or polypeptide, or by contacting the PDE4D gene, mRNA, and/or polypeptide, with an agent that enhances or inhibits expression or activity of PDE4D mRNA or polypeptide. In a preferred embodiment, isoform mRNA and/or protein levels can be altered, compared to control levels, using the agents of the invention.

[0010] Additionally, the invention pertains to pharmaceutical compositions comprising the nucleic acids of the invention, the polypeptides of the invention, and/or the agents that alter activity of PDE4D polypeptide. The invention further pertains to methods of treating stroke, by administering PDE4D therapeutic agents, such as nucleic acids of the invention, polypeptides of the invention, the agents that alter activity of PDE4D polypeptide, or compositions comprising the nucleic acids, polypeptides, and/or the agents that alter activity of PDE4D polypeptide.

[0011] The invention further relates to methods for preventing the occurrence of stroke in an individual in need thereof by regulating a PDE4D mRNA and/or polypeptide isoform level compared to control levels, whereby the regulated isoform level mimics the level of a healthy individual. Isoform expression at the mRNA and/or polypeptide level can be regulated using the agents and pharmaceutical compositions of the invention, by genetic alteration, by altering the ratio of isoforms and/or their absolute expression. In a particularly preferred embodiment, isoforms PDE4D7A and/or PDE4D9 can be regulated.

[0012] The invention further provides a method of diagnosing susceptibility to stroke in an individual. This method comprises screening for one of the at-risk haplotypes in the phosphodiesterase 4D gene that is more frequently present in an individual susceptible to stroke, compared to the frequency of its presence in the general population, wherein the presence of an at-risk haplotype is indicative of a susceptibility to stroke. An “at-risk haplotype” is intended to embrace one or a combination of haplotypes described herein over the PDE4D gene that show high correlation to stroke. In one embodiment, the at-risk haplotype is characterized by the presence of at least one single nucleotide polymorphism at nucleic acid positions 1425923, 1415979, 1414804, 1371388, 1307403 and 1257206, relative to SEQ ID NO: 1. In another embodiment, the at-risk haplotype is characterized by the presence of at least one single nucleotide polymorphism and microsatellite marker at nucleic acid positions 263539, 252772, 189780, 175259, 171240, 136550 and 120628, relative to SEQ ID NO: 1. In yet another embodiment, the at-risk haplotype is characterized by the presence of at least one polymorphism at nucleic acid position 138806, 131865, 129361, 120628 and 91470, relative to SEQ ID NO: 1. The presence of the polymorphisms that comprise the at-risk haplotype can be determined by electrophoretic analysis, restriction length polymorphism analysis, fluorescence energy transfer detection, kinetic PCR, allele specific PCR, sequence analysis, hybridization analysis or other known techniques.

[0013] Kits for diagnosing susceptibility to stroke in an individual are also disclosed and comprise primers for nucleic acid amplification of a region of PDE4D comprising the at-risk haplotype.

[0014] The first major application of the current invention involves prediction of those at higher risk of developing a stroke. Diagnostic tests that define genetic factors contributing to stroke might be used together with or independent of the known clinical risk factors to define an individual's risk relative to the general population. Better means for identifying those individuals at risk for stroke should lead to better prophylactic and treatment regimens, including more aggressive management of the current clinical risk factors such as hypertension, diabetes, hypercholesterolemia, hypertriglyceridemia, obesity, and inflammatory components as reflected by increased C-reactive protein levels or other inflammatory markers. Information on genetic risk may be used by physicians to help convince particular patients to adjust life style and quit smoking. This invention provides the means to define a genetic component that doubles an individual's risk for stroke.

[0015] The second major application of the current invention is the specific identification of a rate-limiting pathway involved in stroke. While many have attempted to find genes that are over-expressed or under-expressed in atherosclerosis plaques in the carotid arteries, the vast majority of the changes seen in diseases blood vessels compared to normal blood vessels are simply a reaction to the underlying process of atherosclerosis and stroke predisposition and are not the underlying cause. A disease gene with genetic variation that is significantly more common in stroke patients as compared to controls, represents a specifically validated causative step in the pathogenesis of stroke. That is, the uncertainty about whether a gene is causative or simply reactive to the disease process is eliminated. The protein encoded by the disease gene defines a rate-limiting molecular pathway involved in the biological process of stroke predisposition. The proteins encoded by such stroke genes or its interacting proteins in its molecular pathway may represent drug targets that may be selectively modulated by small molecule, protein, antibody, or nucleic acid therapies. Such specific information is greatly needed since stroke prevention and treatment is a major unmet medical need that affects over a half-million Americans each year.

[0016] A third application of the current invention is its use to predict an individual's response to a particular drug, even drugs that do not act on PDE4D or its pathway. It is a well-known phenomenon that in general, patients do not respond equally to the same drug. Much of the differences in drug response to a given drug is thought to be based on genetic and protein differences among individuals in certain genes and their corresponding pathways. Our invention defines the PDE4D pathway and its effect on cAMP levels in cells where it is expressed as one key molecular pathway involved in stroke risk. Some current or future therapeutic agents may be able to affect this pathway directly or indirectly and therefore, be effective in those patients whose stroke risk is in part determined by PDE4D pathway genetic variation. On the other hand, those same drugs may be less effective or ineffective in those patients who do not have at risk variation in the PDE4D gene or pathway. Therefore, PDE4D variation or haplotypes may be used as a pharmacogenomic diagnostic to predict drug response and guide choice of therapeutic agent in a given individual.

[0017] The invention helps meet the unmet medical needs in at least two major ways: 1) it provides a means to define patients at higher risk for stroke than the general population who can be more aggressively managed by their physicians in an effort to prevent stroke and; 2) it defines a drug target that can be used to screen and develop therapeutic agents that can be used to prevent stroke before it happens or prevent a second stroke in those who have already suffered a stroke or transient ischemic attack.

### BRIEF DESCRIPTION OF THE DRAWINGS

[0018] The foregoing and other objects, features and advantages of the invention will be apparent from the following more particular description of preferred embodiments of the invention, as illustrated in the accompanying drawings.

[0019] FIGS. 1A and 1B show two family pedigrees each affected by several of the stroke subtypes, including hemorrhagic stroke.

[0020] FIGS. 2A, 2B and 2C show the genetic, combined and physical maps for locating the PDE4D gene using 30 polymorphic markers. For the combined map, all markers have been assigned in the genetic and physical map unless otherwise indicated. (* indicates markers only assigned in physical map; ** indicates markers only assigned in genetic map).

[0021] FIG. 3 shows schematic representations of PDE4D splice variants. Splice variants PDE4D8, PDE4D7A and PDE4D9 are novel, as well as exons D7A-1, D7A-2, D7A-3, D8 and D9. Splice variants 4DN1, 4DN2 and 4DN3 (Miro, et al., Biochem. Biophys. Res. Comm., 274:415-421 (2000)), and 4D1, 4D2, 4D3, 4D4 and 4D5 (Bolger et al., Biochem. J., Pt2:539-548 (1997) are known.

[0022] FIG. 4 is a graphic representation showing PDE4D isoform expression in EBV transformed cells (expression of PDE4D3 and PDE4D9 below detection limits).

[0023] FIG. 5 is a graphic representation showing expression of PDE4D isoforms in EBV transformed cells from patients with or without the stroke-associated haplotype.

[0024] FIG. 6 is a graphic representation showing expression of PDE4D isoforms in EBV cells from controls with or without the stroke-associated haplotype.

[0025] FIGS. 7.1 to 7.10 show the amino acid sequences for the isoforms of the PDE4D gene. SEQ ID NO: 2 is D4; SEQ ID NO: 3 is N2; SEQ ID NO: 4 is D5; SEQ ID NO: 5 is N3; SEQ ID NO: 6 is D3; SEQ ID NO: 7 is N1; SEQ ID NO: 8 is D8; SEQ ID NO: 9 is D1; and SEQ ID NO: 10 is D2.

[0026] FIGS. 8A and 8B list all publicly available PDE4D mRNAs and novel cDNA segments identified by deCODE genetics.

[0027] FIGS. 9.1 to 9.351 show the genomic sequence of the human PDE4D gene.

### DETAILED DESCRIPTION OF THE INVENTION

[0028] The first major stroke locus, STRK1, was mapped to 5q12 using a genome-wide search for susceptibility genes in the common forms of stroke. A broad but rigorous definition of the phenotype was used including patients with ischemic stroke, transient ischemic attack (TIA), and hemorrhagic stroke. The lod score after adding a higher density of markers (one marker every 1 cM) was 4.40 (P=3.9×10⁻⁶ at marker D5S2080. The lodscore increased to 4.9 after the hemorrhagic stroke patients were removed, suggesting that the gene at the locus is primarily important for ischemic stroke. The most promising region harboring a stroke susceptibility gene was narrowed down to a segment less than 6 cM (approximately 3.8 Mb), from D5S1474 to D5S398, as defined by a decrease of one in LOD score (will be referred to as the “one-LOD interval” hereafter).

[0029] We describe here the positional cloning of a stroke susceptibility gene located in the STRK1 locus. This region was extensively fine-mapped and tested for association to stroke. The strongest association found in the one-LOD interval was within the phosphodiesterase 4D gene (PDE4D), a member of the large superfamily of cyclic nucleotide phosphodiesterases. The strongest signal observed at PDE4D was to the two major subtypes of ischemic stroke, carotid and cardiogenic stroke. Relative expression of PDE4D isoforms correlated with stroke and with the genetic variation within PDE4D which is associated to stroke. Our results suggest that this gene is involved in pathogenesis of stroke through atherosclerosis, the major pathological process underlying stroke.

[0030] Our results also indicate that genetic variation in the PDE4D gene is associated with ischemic stroke. The direct involvement of PDE4D is strongly supported by both linkage and haplotype association. Multiple markers and haplotypes within the PDE4D gene show strong association to stroke. We first identified the association using microsatellite markers, and supplementing the microsatellite data with a denser set of SNPs further supported this. The strongest association was to the two ischemic subtypes, carotid and cardiogenic stroke. This gene shows no association to small vessel occlusive disease, the form of stroke thought to be independent of atherosclerosis. Haplotype analyses show that the most significant haplotype extends over an area of 260 kb covering the first exon of the PDE4D gene. The haplotype is significantly associated to carotid and cardiogenic stroke with a relative risk of 2.3 and approximately 47% of carotid/cardiogenic stroke patients carry at least one copy of this haplotype. This same haplotype has a relative risk 1.8 for stroke in general. This haplotype extends over the 5′ exon unique to the PDE4D7A isoform and the presumed promoter region of this isoform suggesting that the functional variation may be involved in transcriptional regulation. This hypothesis is also supported by our PDE4D expression analysis that shows that there is significant correlation between the disease associated haplotype and the level of PDE4D7A message.

[0031] The strongest association found for this PDE4D haplotype was to the two major subtypes of ischemic stroke, carotid and cardiogenic stroke suggesting a role for this gene in the vascular biology of atherosclerosis. While there are multiple etiologies for ischemic stroke, atherosclerosis remains the most important one. Atherosclerosis is a chronic progressive disease characterized by accumulation of lipids, fibrous, and cellular elements within the large arteries. These lesions can grow sufficiently large to impede blood flow and, more importantly, their surfaces can rupture leading to local thrombus formation occluding the blood vessel and causing a stroke or myocardial infarction. The major pathological process for the two ischemic subtypes, carotid and cardiogenic stroke is atherosclerosis. First, it is the major cause of stenotic and occlusive lesions of the internal and common carotids that lead to carotid strokes. Second, cardiac thrombi which shed emboli to the brain most commonly occur on the background of coronary artery disease, such as following acute myocardial infarction or ischemic cardiomyopathy, and/or due to atrial fibrillation on the basis of poor compliance of ischemic ventricles (diastolic dysfunction/stiffening). Although atrial fibrillation may occur on the background of other diseases such as valvular disease, hyperthyroidism, and hypertension, in the age group that tends to suffer from stroke, ischemic heart disease remains one of the most important causes. Ischemic stroke resulting from occlusion of small penetrating arteries within the brain (small vessel occlusive disease or lacunar stroke) is generally thought to result from local endothelial proliferation since atherosclerosis only occurs in larger arteries. PDE4D does not show association to small vessel stroke, consistent with it role in atherosclerosis. In summary, atherosclerosis accounts for the majority of all strokes, particularly carotid and cardiogenic stroke, the two subphenotypes that show the strongest association to the PDE4D gene.

[0032] Representative Target Population

[0033] An individual at risk for stroke is an individual who has at least one risk factor, such as previous stroke or TIA, an at-risk haplotype in one or more stroke risk genes, an at-risk haplotype for the PDE4D gene; a polymorphism in a PDE4D gene; disregulation of PDE4D isoform expression; diabetes; hypertension; hypercholesterolemia; elevated 1p(a); obesity; a past or current smoker; an elevated inflammatory marker (e.g., a marker such as C-reactive protein (CRP), serum amyloid A, fibrinogen, tissue necrosis factor-alpha, a soluble vascular cell adhesion molecule (sVCAM), a soluble intervascular adhesion molecule (sICAM), E-selectin, matrix metalloprotease type-1, matrix metalloprotease type-2, matrix metalloprotease type-3, and matrix metalloprotease type-9); increased LDL cholesterol and/or decreased HDL cholesterol; and/or at least one previous myocardial infarction, concurrent MI, acute coronary syndrome, stable angina, atherosclerosis, carotid stenosis, peripheral vascular occlusive disease, requires treatment for restoration of coronary artery blood flow (e.g., angioplasty, stent, coronary artery bypass graft).

[0034] In another embodiment of the invention, an individual who is at risk for stroke is an individual who has a polymorphism in a PDE4D gene, in which the presence of the polymorphism is indicative of a susceptibility to stroke. The term “gene,” as used herein, refers to not only the sequence of nucleic acids encoding a polypeptide, but also the promoter regions, transcription enhancement elements, splice donor/acceptor sites, splice enhancer and silencer sequences and other regulators of splicing, and other non-transcribed nucleic acid elements. Representative polymorphisms include those presented in Table 11, below.

[0035] In one embodiment of the invention, an individual who is at risk for stroke is an individual who has an at-risk haplotype in PDE4D, as described herein, particularly but not limited to ischemic stroke. Increased risk for the two major subtypes of ischemic stroke, carotid and cardiogenic stroke, can be assessed by screening for at-risk haplotype that comprises SNP5PDM361194, SNP5PDM368135, SNP5PDM370640, SNP5PDM379372 and SNP5PDM408531 at the 5′ UTR of PDE4D7A. Results reported herein indicate that PDE4D is involved in pathogenesis of stroke through atherosclerosis. The major pathological process for carotid stroke and cardiogenic stroke is atherosclerosis. Thus, an individual who is at-risk for atherosclerosis, peripheral arterial occlusive disease, or myocardial infarction can also benefit from the teachings of the invention.

[0036] Assessment for At-Risk Haplotypes

[0037] A “haplotype,” as described herein, refers to a combination of genetic markers (“alleles”), such as those set forth in Table 6B. In a certain embodiment, the haplotype can comprise one or more alleles, two or more alleles, three or more alleles, four or more alleles, or five or more alleles. The genetic markers are particular “alleles” at “polymorphic sites” associated with PDE4D. A nucleotide position at which more than one sequence is possible in a population (either a natural population or a synthetic population, e.g., a library of synthetic molecules), is referred to herein as a “polymorphic site”. Where a polymorphic site is a single nucleotide in length, the site is referred to as a single nucleotide polymorphism (“SNP”). For example, if at a particular chromosomal location, one member of a population has an adenine and another member of the population has a thymine at the same position, then this position is a polymorphic site, and, more specifically, the polymorphic site is a SNP. Polymorphic sites can allow for differences in sequences based on substitutions, insertions or deletions. Each version of the sequence with respect to the polymorphic site is referred to herein as an “allele” of the polymorphic site. Thus, in the previous example, the SNP allows for both an adenine allele and a thymine allele.

[0038] Typically, a reference sequence is referred to for a particular sequence. Alleles that differ from the reference are referred to as “variant” alleles. For example, the reference PDE4D sequence is described herein by SEQ ID NO: 1. The term, “variant PDE4D”, as used herein, refers to a sequence that differs from SEQ ID NO: 1, but is otherwise substantially similar. The genetic markers that make up the haplotypes described herein are PDE4D variants.

[0039] Additional variants can include changes that affect a polypeptide, e.g., the PDE4D polypeptide. These sequence differences, when compared to a reference nucleotide sequence, can include the insertion or deletion of a single nucleotide, or of more than one nucleotide, resulting in a frame shift; the change of at least one nucleotide, resulting in a change in the encoded amino acid; the change of at least one nucleotide, resulting in the generation of a premature stop codon; the deletion of several nucleotides, resulting in a deletion of one or more amino acids encoded by the nucleotides; the insertion of one or several nucleotides, such as by unequal recombination or gene conversion, resulting in an interruption of the coding sequence of a reading frame; duplication of all or a part of a sequence; transposition; or a rearrangement of a nucleotide sequence, as described in detail above. Such sequence changes alter the polypeptide encoded by a PDE4D nucleic acid. For example, if the change in the nucleic acid sequence causes a frame shift, the frame shift can result in a change in the encoded amino acids, and/or can result in the generation of a premature stop codon, causing generation of a truncated polypeptide. Alternatively, a polymorphism associated with stroke or a susceptibility to stroke can be a synonymous change in one or more nucleotides (i.e., a change that does not result in a change in the amino acid sequence). Such a polymorphism can, for example, alter splice sites, affect the stability or transport of mRNA, or otherwise affect the transcription or translation of the polypeptide. The polypeptide encoded by the reference nucleotide sequence is the “reference” polypeptide with a particular reference amino acid sequence, and polypeptides encoded by variant alleles are referred to as “variant” polypeptides with variant amino acid sequences.

[0040] Haplotypes are a combination of genetic markers, e.g., particular alleles at polymorphic sites. The haplotypes described herein, e.g., having markers such as those shown in Table 6B, are found more frequently in individuals with stroke than in individuals without stroke. Therefore, these haplotypes have predictive value for detecting stroke or a susceptibility to stroke in an individual. The haplotypes described herein are a combination of various genetic markers, e.g., SNPs and microsatellites. Therefore, detecting haplotypes can be accomplished by methods known in the art for detecting sequences at polymorphic sites, such as the methods described above.

[0041] In certain methods described herein, an individual who is at risk for stroke is an individual in whom an at-risk haplotype is identified. In one embodiment, the at-risk haplotype is one that confers a significant risk of stroke. In one embodiment, significance associated with a haplotype is measured by an odds ratio. In a further embodiment, the significance is measured by a percentage. In one embodiment, a significant risk is measured as an odds ratio of at least about 1.2, including by not limited to: 1.2, 1.3, 1.4, 1.5, 1.6, 1.7, 1.8 and 1.9. In a further embodiment, an odds ratio of at least 1.2 is significant. In a further embodiment, an odds ratio of at least about 1.5 is significant. In a further embodiment, a significant increase in risk is at least about 1.7 is significant. In a further embodiment, a significant increase in risk is at least about 20%, including but not limited to about 25%, 30%, 35%, 40%, 45%, 50%, 55%, 60%, 65%, 70%, 75%, 80%, 85%, 90%, 95% and 98%. In a further embodiment, a significant increase in risk is at least about 50%. It is understood however, that identifying whether a risk is medically significant may also depend on a variety of factors, including the specific disease, the haplotype, and often, environmental factors.

[0042] An at-risk haplotype in, or comprising portions of, the PDE4D gene, in one where the haplotype is more frequently present in an individual at risk for stroke (affected), compared to the frequency of its presence in a healthy individual (control), and wherein the presence of the haplotype is indicative of stroke or susceptibility to stroke. Standard techniques for genotyping for the presence of SNPs and/or microsatellite markers can be used, such as fluorescent based techniques (Chen, et al., Genome Res. 9, 492 (1999)), PCR, LCR, Nested PCR and other techniques for nucleic acid amplification. In a preferred embodiment, the method comprises assessing in an individual the presence or frequency of SNPs and/or microsatellites in, comprising portions of, the KChIP1 gene, wherein an excess or higher frequency of the SNPs and/or microsatellites compared to a healthy control individual is indicative that the individual has stroke, or is susceptible to stroke. See, for example, Table 6B (below) for SNPs and markers that can form haplotypes that can be used as screening tools. These markers and SNPs can be identified in at-risk haploptypes. For example, an at-risk haplotype can include microsatellite markers and/or SNPs such as those set forth in Table 6B. The presence of the haplotype is indicative of stroke, or a susceptibility to stroke, and therefore is indicative of an individual who falls within a target population for the treatment methods described herein.

[0043] Haplotype analysis involves defining a candidate susceptibility locus using LOD scores. The defined regions are then ultra-fine mapped with microsatellite markers with an average spacing between markers of less than 100 kb. All usable microsatellite markers that found in public databases and mapped within that region can be used. In addition, microsatellite markers identified within the deCODE genetics sequence assembly of the human genome can be used. The frequencies of haplotypes in the patient and the control groups using an expectation-maximization algorithm can be estimated (Dempster A. et al., 1977. J. R. Stat. Soc. B, 39:1-389). An implementation of this algorithm that can handle missing genotypes and uncertainty with the phase can be used. Under the null hypothesis, the patients and the controls are assumed to have identical frequencies. Using a likelihood approach, an alternative hypothesis where a candidate at-risk-haplotype, which can include the markers described herein, is allowed to have a higher frequency in patients than controls, while the ratios of the frequencies of other haplotypes are assumed to be the same in both groups is tested. Likelihoods are maximized separately under both hypotheses and a corresponding 1-df likelihood ratio statistics is used to evaluate the statistic significance.

[0044] To look for at-risk-haplotypes in the 1-lod drop, for example, association of all possible combinations of genotyped markers is studied, provided those markers span a practical region. The combined patient and control groups can be randomly divided into two sets, equal in size to the original group of patients and controls. The haplotype analysis is then repeated and the most significant p-value registered is determined. This randomization scheme can be repeated, for example, over 100 times to construct an empirical distribution of p-values.

[0045] In one embodiment, the at-risk haplotype is characterized by the presence of the polymorphism(s) represented by one or a combination of single nucleotide polymorphisms at nucleic acid positions 1425923, 1415979, 1414804, 1371388, 1307403 and 1257206, relative to SEQ ID NO: 1. In another embodiment, a diagnostic method for susceptibility to stroke can comprise determining the presence of at-risk haplotype represented by one or a combination of single nucleotide polymorphisms and microsatellite markers at nucleic acid positions 263539, 252772, 189780, 175259, 171240, 136550 and 120628, relative to SEQ ID NO: 1. In another embodiment, the at-risk haplotype is characterized by the following SNPs: SNP5PDM361194, SNP5PDM368135, SNP5PDM370640, SNP5PDM379372, and SNP5PDM408531. This haplotype is particularly useful for assessing susceptibility to the two major subtypes of ischemic stroke, carotid and cardiogenic stroke. In another embodiment, an at-risk haplotype, particularly for carotid and cardiogenic stroke, is characterized by use of microsatellite marker AC008818-1 to define the presence of an at-risk allele.

[0046] Nucleic Acid Therapeutic Agents

[0047] In another embodiment, a nucleic acid of the invention; a nucleic acid complementary to a nucleic acid of the invention; or a portion of such a nucleic acid (e.g., an oligonucleotide as described below); or a nucleic acid encoding a PDE4D polypeptide, can be used in “antisense” therapy, in which a nucleic acid (e.g., an oligonucleotide) which specifically hybridizes to the mRNA and/or genomic DNA of a nucleic acid is administered or generated in situ. The antisense nucleic acid that specifically hybridizes to the mRNA and/or DNA inhibits expression of the polypeptide encoded by that mRNA and/or DNA, e.g., by inhibiting translation and/or transcription. Binding of the antisense nucleic acid can be by conventional base pair complementarity, or, for example, in the case of binding to DNA duplexes, through specific interaction in the major groove of the double helix.

[0048] An antisense construct can be delivered, for example, as an expression plasmid as described above. When the plasmid is transcribed in the cell, it produces RNA that is complementary to a portion of the mRNA and/or DNA that encodes a PDE4D polypeptide. Alternatively, the antisense construct can be an oligonucleotide probe that is generated ex vivo and introduced into cells; it then inhibits expression by hybridizing with the mRNA and/or genomic DNA of the polypeptide. In one embodiment, the oligonucleotide probes are modified oligonucleotides that are resistant to endogenous nucleases, e.g., exonucleases and/or endonucleases, thereby rendering them stable in vivo. Exemplary nucleic acid molecules for use as antisense oligonucleotides are phosphoramidate, phosphothioate and methylphosphonate analogs of DNA (see also U.S. Pat. Nos. 5,176,996, 5,264,564 and 5,256,775). Additionally, general approaches to constructing oligomers useful in antisense therapy are also described, for example, by Van der Krol et al (Biotechniques 6:958-976 (1988)); and Stein et al. (Cancer Res. 48:2659-2668 (1988)). With respect to antisense DNA, oligodeoxyribonucleotides derived from the translation initiation site are preferred.

[0049] To perform antisense therapy, oligonucleotides (mRNA, cDNA or DNA) are designed that are complementary to mRNA encoding the polypeptide. The antisense oligonucleotides bind to mRNA transcripts and prevent translation. Absolute complementarity, although preferred, is not required. A sequence “complementary” to a portion of an RNA, as referred to herein, indicates that a sequence has sufficient complementarity to be able to hybridize with the RNA, forming a stable duplex; in the case of double-stranded antisense nucleic acids, a single strand of the duplex DNA may thus be tested, or triplex formation may be assayed. The ability to hybridize will depend on both the degree of complementarity and the length of the antisense nucleic acid, as described in detail above. Generally, the longer the hybridizing nucleic acid, the more base mismatches with an RNA it may contain and still form a stable duplex (or triplex, as the case may be). One skilled in the art can ascertain a tolerable degree of mismatch by use of standard procedures.

[0050] The oligonucleotides used in antisense therapy can be DNA, RNA, or chimeric mixtures or derivatives or modified versions thereof, single-stranded or double-stranded. The oligonucleotides can be modified at the base moiety, sugar moiety, or phosphate backbone, for example, to improve stability of the molecule, hybridization, etc. The oligonucleotides can include other appended groups such as peptides (e.g. for targeting host cell receptors in vivo), or agents facilitating transport across the cell membrane (see, e.g., Letsinger et al., Proc. Natl. Acad. Sci. USA 86:6553-6556 (1989); Lemaitre et al., Proc. Natl. Acad. Sci. USA 84:648-652 (1987); PCT International Publication No. WO 88/09810) or the blood-brain barrier (see, e.g., PCT International Publication No. WO 89/10134), or hybridization-triggered cleavage agents (see, e.g., Krol et al, BioTechniques 6:958-976 (1988)) or intercalating agents. (See, e.g., Zon, Pharm. Res. 5: 539-549 (1988)). To this end, the oligonucleotide may be conjugated to another molecule (e.g., a peptide, hybridization triggered cross-linking agent, transport agent, hybridization-triggered cleavage agent).

[0051] The antisense molecules are delivered to cells that express a PDE4D polypeptide in vivo. A number of methods can be used for delivering antisense DNA or RNA to cells; e.g., antisense molecules can be injected directly into the tissue site, or modified antisense molecules, designed to target the desired cells (e.g., antisense linked to peptides or antibodies that specifically bind receptors or antigens expressed on the target cell surface) can be administered systematically. Alternatively, in a preferred embodiment, a recombinant DNA construct is utilized in which the antisense oligonucleotide is placed under the control of a strong promoter (e.g., pol III or pol II). The use of such a construct to transfect target cells in the patient results in the transcription of sufficient amounts of single stranded RNAs that will form complementary base pairs with the endogenous transcripts and thereby prevent translation of the mRNA. For example, a vector can be introduced in vivo such that it is taken up by a cell and directs the transcription of an antisense RNA. Such a vector can remain episomal or become chromosomally integrated, as long as it can be transcribed to produce the desired antisense RNA. Such vectors can be constructed by recombinant DNA technology methods standard in the art and described above. For example, a plasmid, cosmid, YAC or viral vector can be used to prepare the recombinant DNA construct that can be introduced directly into the tissue site. Alternatively, viral vectors can be used which selectively infect the desired tissue, in which case administration may be accomplished by another route (e.g., systemically).

[0052] In another embodiment of the invention, small double-stranded interfering RNA (RNA interference (RNAi)) can be used. RNAi is a post-transcription process, in which double-stranded RNA is introduced, and sequence-specific gene silencing results, though catalytic degradation of the targeted mRNA. See, e.g., Elbashir, S. M. et al., Nature 411:494-498 (2001); Lee, N. S., Nature Biotech. 19:500-505 (2002); Lee, S-K. et al., Nature Medicine 8(7):681-686 (2002); the entire teachings of these references are incorporated herein by reference.

[0053] Endogenous expression of a gene product can also be reduced by inactivating or “knocking out” the gene or its promoter using targeted homologous recombination (e.g., see Smithies et al., Nature 317:230-234 (1985); Thomas & Capecchi, Cell 51:503-512 (1987); Thompson et al., Cell 5:313-321 (1989)). For example, an altered, non-functional gene (or a completely unrelated DNA sequence) flanked by DNA homologous to the endogenous gene (either the coding regions or regulatory regions of the gene) can be used, with or without a selectable marker and/or a negative selectable marker, to transfect cells that express the gene in vivo. Insertion of the DNA construct, via targeted homologous recombination, results in inactivation of the gene. The recombinant DNA constructs can be directly administered or targeted to the required site in vivo using appropriate vectors, as described above. Alternatively, expression of non-altered genes can be increased using a similar method: targeted homologous recombination can be used to insert a DNA construct comprising a non-altered functional gene, or the complement thereof, or a portion thereof, in place of an gene in the cell, as described above. In another embodiment, targeted homologous recombination can be used to insert a DNA construct comprising a nucleic acid that encodes a polypeptide variant that differs from that present in the cell.

[0054] Alternatively, endogenous expression of a gene product can be reduced by targeting deoxyribonucleotide sequences complementary to the regulatory region (i.e., the promoter and/or enhancers) to form triple helical structures that prevent transcription of the gene in target cells in the body. (See generally, Helene, C., Anticancer Drug Des., 6(6):569-84 (1991); Helene, C. et al., Ann. N. Y Acad. Sci. 660:27-36 (1992); and Maher, L. J., Bioassays 14(12):807-15 (1992)). Likewise, the antisense constructs described herein, by antagonizing the normal biological activity of the gene product, can be used in the manipulation of tissue, e.g., tissue differentiation, both in vivo and for ex vivo tissue cultures. Furthermore, the anti-sense techniques (e.g., microinjection of antisense molecules, or transfection with plasmids whose transcripts are anti-sense with regard to a nucleic acid RNA or nucleic acid sequence) can be used to investigate the role of one or more members of the PDE4D pathway in the development of disease-related conditions. Such techniques can be utilized in cell culture, but can also be used in the creation of transgenic animals.

[0055] The therapeutic agents as described herein can be delivered in a composition, as described above, or by themselves. They can be administered systemically, or can be targeted to a particular tissue. The therapeutic agents can be produced by a variety of means, including chemical synthesis; recombinant production; in vivo production (e.g., a transgenic animal, such as U.S. Pat. No. 4,873,316 to Meade et al.), for example, and can be isolated using standard means such as those described herein. In addition, a combination of any of the above methods of treatment (e.g., administration of non-altered polypeptide in conjunction with antisense therapy targeting altered mRNA; administration of a first splicing variant in conjunction with antisense therapy targeting a second splicing variant) can also be used.

[0056] The invention additionally pertains to use of such therapeutic agents, as described herein, for the manufacture of a medicament for the treatment of stroke, TIA, MI, and/or atherosclerosis, e.g., using the methods described herein.

[0057] Monitoring Progress of Treatment

[0058] The current invention also pertains to methods of monitoring the effectiveness of treatment on the regulation of expression (e.g., relative or absolute expression) of one or more PDE4D isoforms at the RNA or protein level or its enzymatic activity. PDE4D message or protein or enzymatic activity can be measured in a sample of peripheral blood or cells derived therefrom. An assessment of the levels of expression or activity can be made before and during treatment with PDE4D therapeutic agents.

[0059] For example, in one embodiment of the invention, an individual who is a member of the target population can be assessed for response to treatment with a PDE4D inhibitor, by examining cAMP levels or PDE4D enzymatic activity or absolute and/or relative levels of PDE4D protein or mRNA isoforms in peripheral blood in general or specific cell subfractions or combination of cell subfractions. In addition, variation such as haplotypes or mutations within or near (within 100 to 200 kb) of the PDE4D gene may be used to identify individuals who are at higher risk for stroke or TIA to increase the power and efficiency of clinical trials for pharmaceutical agents to prevent or treat first or subsequent stroke. The haplotypes and other variation may be used to exclude or fractionate patients in a clinical trial who are likely to have non-cAMP or non-PDE4D pathway involvement in their stroke risk in order to enrich patients who have other pathways involved and boost the power and sensitivity of the clinical trial. Such variation may be used as a pharmacogenomic test to guide selection of pharmaceutical agents for individuals.

[0060] Nucleic Acids of the Invention

[0061] Nucleic Acids, Portions and Variants

[0062] In addition, the invention pertains to isolated nucleic acid molecules comprising a human PDE4D nucleic acid. The term, “PDE4D nucleic acid,” as used herein, refers to an isolated nucleic acid molecule encoding PDE4D polypeptide. The PDE4D nucleic acid molecules of the present invention can be RNA, for example, mRNA, or DNA, such as cDNA and genomic DNA. DNA molecules can be double-stranded or single-stranded; single stranded RNA or DNA can be either the coding, or sense strand or the non-coding, or antisense strand. The nucleic acid molecule can include all or a portion of the coding sequence of the gene or nucleic acid and can further comprise additional non-coding sequences such as introns and non-coding 3′ and 5′ sequences (including regulatory sequences, for example, as well as promoters, transcription enhancement elements, splice donor/acceptor sites, etc.). For example, a PDE4D nucleic acid can comprise the nucleic acid of SEQ ID NO: 1 which may optionally comprise at least one polymorphism as shown in Tables 9 and 10, the complement thereof, or to a portion or fragment of such an isolated nucleic acid molecule (e.g., cDNA or the nucleic acid) that encodes PDE4D polypeptide.

[0063] Additionally, the nucleic acid molecules of the invention can be fused to a marker sequence, for example, a sequence that encodes a polypeptide to assist in isolation or purification of the polypeptide. Such sequences include, but are not limited to, those that encode a glutathione-S-transferase (GST) fusion protein and those that encode a hemagglutinin A (HA) polypeptide marker from influenza.

[0064] An “isolated” nucleic acid molecule, as used herein, is one that is separated from nucleic acids which normally flank the gene or nucleotide sequence (as in genomic sequences) and/or has been completely or partially purified from other transcribed sequences (e.g., as in an RNA library). For example, an isolated nucleic acid of the invention may be substantially isolated with respect to the complex cellular milieu in which it naturally occurs, or culture medium when produced by recombinant techniques, or chemical precursors or other chemicals when chemically synthesized. In some instances, the isolated material will form part of a composition (for example, a crude extract containing other substances), buffer system or reagent mix. In other circumstances, the material may be purified to essential homogeneity, for example as determined by PAGE or column chromatography such as HPLC. Preferably, an isolated nucleic acid molecule comprises at least about 50, 80 or 90% (on a molar basis) of all macromolecular species present. With regard to genomic DNA, the term “isolated” also can refer to nucleic acid molecules which are separated from the chromosome with which the genomic DNA is naturally associated. For example, the isolated nucleic acid molecule can contain less than about 5 kb, 4 kb, 3 kb, 2 kb, 1 kb, 0.5 kb or 0.1 kb of nucleotides which flank the nucleic acid molecule in the genomic DNA of the cell from which the nucleic acid molecule is derived.

[0065] The nucleic acid molecule can be fused to other coding or regulatory sequences and still be considered isolated. Thus, recombinant DNA contained in a vector is included in the definition of “isolated” as used herein. Also, isolated nucleic acid molecules include recombinant DNA molecules in heterologous host cells, as well as partially or substantially purified DNA molecules in solution. “Isolated” nucleic acid molecules also encompass in vivo and in vitro RNA transcripts of the DNA molecules of the present invention. An isolated nucleic acid molecule or nucleotide sequence can include a nucleic acid molecule or nucleotide sequence which is synthesized chemically or by recombinant means. Therefore, recombinant DNA contained in a vector are included in the definition of “isolated” as used herein. Also, isolated nucleotide sequences include recombinant DNA molecules in heterologous organisms, as well as partially or substantially purified DNA molecules in solution. In vivo and in vitro RNA transcripts of the DNA molecules of the present invention are also encompassed by “isolated” nucleotide sequences. Such isolated nucleotide sequences are useful in the manufacture of the encoded polypeptide, as probes for isolating homologous sequences (e.g., from other mammalian species), for gene mapping (e.g., by in situ hybridization with chromosomes), or for detecting expression of the gene in tissue (e.g., human tissue), such as by Northern blot analysis.

[0066] The present invention also pertains to variant nucleic acid molecules which are not necessarily found in nature but which encode a PDE4D polypeptide (e.g., a polypeptide having the amino acid sequence of SEQ ID NO: 2, 3, 4, 5, 6, 7, 8, 9, 10, 12 or 14), or another splicing variant of PDE4D polypeptide or polymorphic variant thereof. Thus, for example, DNA molecules which comprise a sequence that is different from the naturally-occurring nucleotide sequence but which, due to the degeneracy of the genetic code, encode a PDE4D polypeptide of the present invention are also the subject of this invention. The invention also encompasses nucleotide sequences encoding portions (fragments), or encoding variant polypeptides such as analogues or derivatives of the PDE4D polypeptide. Such variants can be naturally-occurring, such as in the case of allelic variation or single nucleotide polymorphisms, or non-naturally-occurring, such as those induced by various mutagens and mutagenic processes. Intended variations include, but are not limited to, addition, deletion and substitution of one or more nucleotides which can result in conservative or non-conservative amino acid changes, including additions and deletions. Preferably the nucleotide (and/or resultant amino acid) changes are silent or conserved; that is, they do not alter the characteristics or activity of the PDE4D polypeptide. In one preferred embodiment, the nucleotide sequences are fragments that comprise one or more polymorphic microsatellite markers. In another preferred embodiment, the nucleotide sequences are fragments that comprise one or more single nucleotide polymorphisms in the PDE4D gene.

[0067] Other alterations of the nucleic acid molecules of the invention can include, for example, labeling, methylation, internucleotide modifications such as uncharged linkages (e.g., methyl phosphonates, phosphotriesters, phosphoamidates, carbamates), charged linkages (e.g., phosphorothioates, phosphorodithioates), pendent moieties (e.g., polypeptides), intercalators (e.g., acridine, psoralen), chelators, alkylators, and modified linkages (e.g., alpha anomeric nucleic acids). Also included are synthetic molecules that mimic nucleic acid molecules in the ability to bind to a designated sequences via hydrogen bonding and other chemical interactions. Such molecules include, for example, those in which peptide linkages substitute for phosphate linkages in the backbone of the molecule.

[0068] The invention also pertains to nucleic acid molecules which hybridize under high stringency hybridization conditions, such as for selective hybridization, to a nucleotide sequence described herein (e.g., nucleic acid molecules which specifically hybridize to a nucleotide sequence encoding polypeptides described herein, and, optionally, have an activity of the polypeptide). In one embodiment, the invention includes variants described herein which hybridize under high stringency hybridization conditions (e.g., for selective hybridization) to a nucleotide sequence comprising a nucleotide sequence selected from SEQ ID NO: 1 which may optionally comprise at least one polymorphism as shown in Tables 9 and 10 or the complement thereof. In another embodiment, the invention includes variants described herein which hybridize under high stringency hybridization conditions (e.g., for selective hybridization) to a nucleotide sequence encoding an amino acid sequence selected from SEQ ID NO: 2, 3, 4, 5, 6, 7, 8, 9, 10, 12 or 14 or polymorphic variant thereof. In a preferred embodiment, the protein product of the variant which hybridizes under high stringency conditions has an activity of PDE4D.

[0069] Such nucleic acid molecules can be detected and/or isolated by specific hybridization (e.g., under high stringency conditions). “Specific hybridization,” as used herein, refers to the ability of a first nucleic acid to hybridize to a second nucleic acid in a manner such that the first nucleic acid does not hybridize to any nucleic acid other than to the second nucleic acid (e.g., when the first nucleic acid has a higher similarity to the second nucleic acid than to any other nucleic acid in a sample wherein the hybridization is to be performed). “Stringency conditions” for hybridization is a term of art which refers to the incubation and wash conditions, e.g., conditions of temperature and buffer concentration, which permit hybridization of a particular nucleic acid to a second nucleic acid; the first nucleic acid may be perfectly (i.e., 100%) complementary to the second, or the first and second may share some degree of complementarity which is less than perfect (e.g., 70%, 75%, 85%, 95%). For example, certain high stringency conditions can be used which distinguish perfectly complementary nucleic acids from those of less complementarity. “High stringency conditions”, “moderate stringency conditions” and “low stringency conditions” for nucleic acid hybridizations are explained on pages 2.10.1-2.10.16 and pages 6.3.1-6.3.6 in Current Protocols in Molecular Biology (Ausubel, F. M. et al., “Current Protocols in Molecular Biology”, John Wiley & Sons, (1998), the entire teachings of which are incorporated by reference herein). The exact conditions which determine the stringency of hybridization depend not only on ionic strength (e.g., 0.2×SSC, 0.1×SSC), temperature (e.g., room temperature, 42° C., 68° C.) and the concentration of destabilizing agents such as formamide or denaturing agents such as SDS, but also on factors such as the length of the nucleic acid sequence, base composition, percent mismatch between hybridizing sequences and the frequency of occurrence of subsets of that sequence within other non-identical sequences. Thus, equivalent conditions can be determined by varying one or more of these parameters while maintaining a similar degree of identity or similarity between the two nucleic acid molecules. Typically, conditions are used such that sequences at least about 60%, at least about 70%, at least about 80%, at least about 90% or at least about 95% or more identical to each other remain hybridized to one another. By varying hybridization conditions from a level of stringency at which no hybridization occurs to a level at which hybridization is first observed, conditions which will allow a given sequence to hybridize (e.g., selectively) with the most similar sequences in the sample can be determined.

[0070] Exemplary conditions are described in Krause, M. H. and S. A. Aaronson, Methods in Enzymology, 200:546-556 (1991). Also, in, Ausubel, et al., “Current Protocols in Molecular Biology”, John Wiley & Sons, (1998), which describes the determination of washing conditions for moderate or low stringency conditions. Washing is the step in which conditions are usually set so as to determine a minimum level of complementarity of the hybrids. Generally, starting from the lowest temperature at which only homologous hybridization occurs, each ° C. by which the final wash temperature is reduced (holding SSC concentration constant) allows an increase by 1% in the maximum extent of mismatching among the sequences that hybridize. Generally, doubling the concentration of SSC results in an increase in Tₘ of ˜17° C. Using these guidelines, the washing temperature can be determined empirically for high, moderate or low stringency, depending on the level of mismatch sought.

[0071] For example, a low stringency wash can comprise washing in a solution containing 0.2×SSC/0.1% SDS for 10 min at room temperature; a moderate stringency wash can comprise washing in a prewarmed solution (42° C.) solution containing 0.2×SSC/0.1% SDS for 15 min at 42° C.; and a high stringency wash can comprise washing in prewarmed (68° C.) solution containing 0.1×SSC/0.1%SDS for 15 min at 68° C. Furthermore, washes can be performed repeatedly or sequentially to obtain a desired result as known in the art. Equivalent conditions can be determined by varying one or more of the parameters given as an example, as known in the art, while maintaining a similar degree of identity or similarity between the target nucleic acid molecule and the primer or probe used.

[0072] The percent homology or identity of two nucleotide or amino acid sequences can be determined by aligning the sequences for optimal comparison purposes (e.g., gaps can be introduced in the sequence of a first sequence for optimal alignment). The nucleotides or amino acids at corresponding positions are then compared, and the percent identity between the two sequences is a function of the number of identical positions shared by the sequences (i.e., % identity=# of identical positions/total # of positions×100). When a position in one sequence is occupied by the same nucleotide or amino acid residue as the corresponding position in the other sequence, then the molecules are homologous at that position. As used herein, nucleic acid or amino acid “homology” is equivalent to nucleic acid or amino acid “identity”. In certain embodiments, the length of a sequence aligned for comparison purposes is at least 30%, for example, at least 40%, in certain embodiments at least 60%, and in other embodiments at least 70%, 80%, 90% or 95% of the length of the reference sequence. The actual comparison of the two sequences can be accomplished by well-known methods, for example, using a mathematical algorithm. A preferred, non-limiting example of such a mathematical algorithm is described in Karlin et al., Proc. Natl. Acad. Sci. USA 90:5873-5877 (1993). Such an algorithm is incorporated into the NBLAST and XBLAST programs (version 2.0) as described in Altschul et al., Nucleic Acids Res. 25:389-3402 (1997). When utilizing BLAST and Gapped BLAST programs, the default parameters of the respective programs (e.g., NBLAST) can be used. In one embodiment, parameters for sequence comparison can be set at score=100, wordlength=12, or can be varied (e.g., W=5 or W=20).

[0073] Another preferred, non-limiting example of a mathematical algorithm utilized for the comparison of sequences is the algorithm of Myers and Miller, CABIOS (1989). Such an algorithm is incorporated into the ALIGN program (version 2.0) which is part of the GCG sequence alignment software package. When utilizing the ALIGN program for comparing amino acid sequences, a PAM 120 weight residue table, a gap length penalty of 12, and a gap penalty of 4 can be used. Additional algorithms for sequence analysis are known in the art and include ADVANCE and ADAM as described in Torellis and Robotti (1994) Comput. Appl. Biosci., 10:3-5; and FASTA described in Pearson and Lipman (1988) PNAS, 85:2444-8.

[0074] In another embodiment, the percent identity between two amino acid sequences can be accomplished using the GAP program in the GCG software package (Accelrys, Cambridge, UK) using either a Blossom 63 matrix or a PAM250 matrix, and a gap weight of 12, 10, 8, 6, or 4 and a length weight of 2, 3, or 4. In yet another embodiment, the percent identity between two nucleic acid sequences can be accomplished using the GAP program in the GCG software package, using a gap weight of 50 and a length weight of 3.

[0075] The present invention also provides isolated nucleic acid molecules that contain a fragment or portion that hybridizes under highly stringent conditions to a nucleotide sequence comprising a nucleotide sequence selected from SEQ ID NO: 1 which may optionally comprise at least one polymorphism as shown in Tables 9 and 10 and the complement thereof, and also provides isolated nucleic acid molecules that contain a fragment or portion that hybridizes under highly stringent conditions to a nucleotide sequence encoding an amino acid sequence selected from SEQ ID NO: 2, 3, 4, 5, 6, 7, 8, 9, 10, 12 or 14, or polymorphic variant thereof. The nucleic acid fragments of the invention are at least about 15, preferably at least about 18, 20, 23 or 25 nucleotides, and can be 30, 40, 50, 100, 200 or more nucleotides in length. Longer fragments, for example, 30 or more nucleotides in length, which encode antigenic polypeptides described herein are particularly useful, such as for the generation of antibodies as described below.

[0076] Probes and Primers

[0077] In a related aspect, the nucleic acid fragments of the invention are used as probes or primers in assays such as those described herein. “Probes” or “primers” are oligonucleotides that hybridize in a base-specific manner to a complementary strand of nucleic acid molecules. By “base specific manner” is meant that the two sequences must have a degree of nucleotide complementarity sufficient for the primer or probe to hybridize. Accordingly, the primer or probe sequence is not required to be perfectly complementary to the sequence of the template. Non-complementary bases or modified bases can be interspersed into the primer or probe, provided that base substitutions do not inhibit hybridization. The nucleic acid template may also include “non-specific priming sequences” or “nonspecific sequences” to which the primer or probe has varying degrees of complementarity. Such probes and primers include polypeptide nucleic acids, as described in Nielsen et al., Science, 254, 1497-1500 (1991).

[0078] A probe or primer comprises a region of nucleic acid that hybridizes to at least about 15, for example about 20-25, and in certain embodiments about 40, 50 or 75, consecutive nucleotides of a nucleic acid of the invention, such as a nucleic acid comprising a contiguous nucleic acid sequence of SEQ ID NO:1 or the complement of SEQ ID No: 1, or a nucleic acid sequence encoding an amino acid sequence of SEQ ID NO: 2, 3, 4, 5, 6, 7, 8, 9, 10, 12 OR 14, or polymorphic variant thereof. In preferred embodiments, a probe or primer comprises 100 or fewer nucleotides, in certain embodiments, from 6 to 50 nucleotides, for example, from 12 to 30 nucleotides. In other embodiments, the probe or primer is at least 70% identical to the contiguous nucleic acid sequence or to the complement of the contiguous nucleotide sequence, for example, at least 80% identical, in certain embodiments at least 90% identical, and in other embodiments at least 95% identical, or even capable of selectively hybridizing to the contiguous nucleic acid sequence or to the complement of the contiguous nucleotide sequence. Often, the probe or primer further comprises a label, e.g., radioisotope, fluorescent compound, enzyme, or enzyme co-factor.

[0079] The nucleic acid molecules of the invention such as those described above can be identified and isolated using standard molecular biology techniques and the sequence information provided herein. For example, nucleic acid molecules can be amplified and isolated by the polymerase chain reaction using synthetic oligonucleotide primers designed based on one or more of the sequences provided in SEQ ID NO: 1 which may optionally comprise at least one polymorphism shown in Tables 9 and 10, and/or the complement thereof, or designed based on nucleotides based on sequences encoding one or more of the amino acid sequences provided herein. See generally PCR Technology: Principles and Applications for DNA Amplification (ed. H. A. Erlich, Freeman Press, NY, N.Y., 1992); PCR Protocols: A Guide to Methods and Applications (Eds. Innis, et al., Academic Press, San Diego, Calif., 1990); Mattila et al., Nucleic Acids Res., 19:4967 (1991); Eckert et al., PCR Methods and Applications, 1:17 (1991); PCR (eds. McPherson et al., IRL Press, Oxford); and U.S. Pat. No. 4,683,202. The nucleic acid molecules can be amplified using cDNA, mRNA or genomic DNA as a template, cloned into an appropriate vector and characterized by DNA sequence analysis.

[0080] Other suitable amplification methods include the ligase chain reaction (LCR) (see Wu and Wallace, Genomics, 4:560 (1989), Landegren et al., Science, 241:1077 (1988), transcription amplification (Kwoh et al., Proc. Natl. Acad. Sci. USA, 86.1173 (1989)), and self-sustained sequence replication (Guatelli et al., Proc. Nat. Acad. Sci. USA, 87:1874 (1990)) and nucleic acid based sequence amplification (NASBA). The latter two amplification methods involve isothermal reactions based on isothermal transcription, which produce both single stranded RNA (ssRNA) and double stranded DNA (dsDNA) as the amplification products in a ratio of about 30 or 100 to 1, respectively.

[0081] The amplified DNA can be labeled (e.g., with radiolabel or other reporter molecule) and used as a probe for screening a cDNA library derived from human cells, mRNA in zap express, ZIPLOX or other suitable vector. Corresponding clones can be isolated, DNA can obtained following in vivo excision, and the cloned insert can be sequenced in either or both orientations by art recognized methods to identify the correct reading frame encoding a polypeptide of the appropriate molecular weight. For example, the direct analysis of the nucleotide sequence of nucleic acid molecules of the present invention can be accomplished using well-known methods that are commercially available. See, for example, Sambrook et al., Molecular Cloning, A Laboratory Manual (2nd Ed., CSHP, New York 1989); Zyskind et al., Recombinant DNA Laboratory Manual, (Acad. Press, 1988)). Using these or similar methods, the polypeptide and the DNA encoding the polypeptide can be isolated, sequenced and further characterized.

[0082] Antisense nucleic acid molecules of the invention can be designed using the nucleotide sequences of SEQ ID NO: 1 and/or the complement of SEQ ID NO: 1, and/or a portion of SEQ ID NO: 1 or the complement of SEQ ID NO: 1 and/or a sequence encoding the amino acid sequences or SEQ ID NO: 2, 3, 4, 5, 6, 7, 8, 9, 10, 12 and/or 14, or encoding a portion of SEQ ID NO: 2, 3, 4, 5, 6, 7, 8, 9, 10, 12 and/or 14, (wherein any one of these may optionally comprise at least one polymorphism as shown in Tables 9 and 10) and constructed using chemical synthesis and enzymatic ligation reactions using procedures known in the art. For example, an antisense nucleic acid molecule (e.g., an antisense oligonucleotide) can be chemically synthesized using naturally occurring nucleotides or variously modified nucleotides designed to increase the biological stability of the molecules or to increase the physical stability of the duplex formed between the antisense and sense nucleic acids, e.g., phosphorothioate derivatives and acridine substituted nucleotides can be used. Alternatively, the antisense nucleic acid molecule can be produced biologically using an expression vector into which a nucleic acid molecule has been subcloned in an antisense orientation (i.e., RNA transcribed from the inserted nucleic acid molecule will be of an antisense orientation to a target nucleic acid of interest).

[0083] In general, the isolated nucleic acid sequences of the invention can be used as molecular weight markers on Southern gels, and as chromosome markers which are labeled to map related gene positions. The nucleic acid sequences can also be used to compare with endogenous DNA sequences in patients to identify genetic disorders (e.g., a predisposition for or susceptibility to stroke), and as probes, such as to hybridize and discover related DNA sequences or to subtract out known sequences from a sample. The nucleic acid sequences can further be used to derive primers for genetic fingerprinting, to raise anti-polypeptide antibodies using DNA immunization techniques, and as an antigen to raise anti-DNA antibodies or elicit immune responses. Portions or fragments of the nucleotide sequences identified herein (and the corresponding complete gene sequences) can be used in numerous ways as polynucleotide reagents. For example, these sequences can be used to: (i) map their respective genes on a chromosome; and, thus, locate gene regions associated with genetic disease; (ii) identify an individual from a minute biological sample (tissue typing); and (iii) aid in forensic identification of a biological sample. Additionally, the nucleotide sequences of the invention can be used to identify and express recombinant polypeptides for analysis, characterization or therapeutic use, or as markers for tissues in which the corresponding polypeptide is expressed, either constitutively, during tissue differentiation, or in diseased states. The nucleic acid sequences can additionally be used as reagents in the screening and/or diagnostic assays described herein, and can also be included as components of kits (e.g., reagent kits) for use in the screening and/or diagnostic assays described herein.

[0084] Vectors

[0085] Another aspect of the invention pertains to nucleic acid constructs containing a nucleic acid molecule selected from the group consisting of SEQ ID NO: 1 which may optionally comprise at least one polymorphism shown in Tables 9 and 10 and the complement thereof (or a portion thereof). Yet another aspect of the invention pertains to nucleic acid constructs containing a nucleic acid molecule encoding the amino acid sequence of SEQ ID NO: 2, 3, 4, 5, 6, 7, 8, 9, 10, 12 or 14 or polymorphic variant thereof The constructs comprise a vector (e.g., an expression vector) into which a sequence of the invention has been inserted in a sense or antisense orientation. As used herein, the term “vector” refers to a nucleic acid molecule capable of transporting another nucleic acid to which it has been linked. One type of vector is a “plasmid”, which refers to a circular double stranded DNA loop into which additional DNA segments can be ligated. Another type of vector is a viral vector, wherein additional DNA segments can be ligated into the viral genome. Certain vectors are capable of autonomous replication in a host cell into which they are introduced (e.g., bacterial vectors having a bacterial origin of replication and episomal mammalian vectors). Other vectors (e.g., non-episomal mammalian vectors) are integrated into the genome of a host cell upon introduction into the host cell, and thereby are replicated along with the host genome. Moreover, certain vectors, expression vectors, are capable of directing the expression of genes to which they are operably linked. In general, expression vectors of utility in recombinant DNA techniques are often in the form of plasmids. However, the invention is intended to include such other forms of expression vectors, such as viral vectors (e.g., replication defective retroviruses, adenoviruses and adeno-associated viruses) that serve equivalent functions.

[0086] Preferred recombinant expression vectors of the invention comprise a nucleic acid molecule of the invention in a form suitable for expression of the nucleic acid molecule in a host cell. This means that the recombinant expression vectors include one or more regulatory sequences, selected on the basis of the host cells to be used for expression, which is operably linked to the nucleic acid sequence to be expressed. Within a recombinant expression vector, “operably or operatively linked” is intended to mean that the nucleotide sequence of interest is linked to the regulatory sequence(s) in a manner which allows for expression of the nucleotide sequence (e.g., in an in vitro transcription/translation system or in a host cell when the vector is introduced into the host cell). The term “regulatory sequence” is intended to include promoters, enhancers and other expression control elements (e.g., polyadenylation signals). Such regulatory sequences are described, for example, in Goeddel, Gene Expression Technology: Methods in Enzymology 185, Academic Press, San Diego, Calif. (1990). Regulatory sequences include those which direct constitutive expression of a nucleotide sequence in many types of host cell and those which direct expression of the nucleotide sequence only in certain host cells (e.g., tissue-specific regulatory sequences). It will be appreciated by those skilled in the art that the design of the expression vector can depend on such factors as the choice of the host cell to be transformed and the level of expression of polypeptide desired. The expression vectors of the invention can be introduced into host cells to thereby produce polypeptides, including fusion polypeptides, encoded by nucleic acid molecules as described herein.

[0087] The recombinant expression vectors of the invention can be designed for expression of a polypeptide of the invention in prokaryotic or eukaryotic cells, e.g., bacterial cells such as E. coli, insect cells (using baculovirus expression vectors), yeast cells or mammalian cells. Suitable host cells are discussed further in Goeddel, supra. Alternatively, the recombinant expression vector can be transcribed and translated in vitro, for example using T7 promoter regulatory sequences and T7 polymerase.

[0088] Another aspect of the invention pertains to host cells into which a recombinant expression vector of the invention has been introduced. The terms “host cell” and “recombinant host cell” are used interchangeably herein. It is understood that such terms refer not only to the particular subject cell but also to the progeny or potential progeny of such a cell. Because certain modifications may occur in succeeding generations due to either mutation or environmental influences, such progeny may not, in fact, be identical to the parent cell, but are still included within the scope of the term as used herein.

[0089] A host cell can be any prokaryotic or eukaryotic cell. For example, a nucleic acid molecule of the invention can be expressed in bacterial cells (e.g., E. coli), insect cells, yeast or mammalian cells (such as Chinese hamster ovary cells (CHO) or COS cells). Other suitable host cells are known to those skilled in the art.

[0090] Vector DNA can be introduced into prokaryotic or eukaryotic cells via conventional transformation or transfection techniques. As used herein, the terms “transformation” and “transfection” are intended to refer to a variety of art-recognized techniques for introducing a foreign nucleic acid molecule (e.g., DNA) into a host cell, including calcium phosphate or calcium chloride co-precipitation, DEAE-dextran-mediated transfection, lipofection, or electroporation. Suitable methods for transforming or transfecting host cells can be found in Sambrook, et al., (supra), and other laboratory manuals.

[0091] For stable transfection of mammalian cells, it is known that, depending upon the expression vector and transfection technique used, only a small fraction of cells may integrate the foreign DNA into their genome. In order to identify and select these integrants, a gene that encodes a selectable marker (e.g., for resistance to antibiotics) is generally introduced into the host cells along with the gene of interest. Preferred selectable markers include those that confer resistance to drugs, such as G418, hygromycin and methotrexate. Nucleic acid molecules encoding a selectable marker can be introduced into a host cell on the same vector as the nucleic acid molecule of the invention or can be introduced on a separate vector. Cells stably transfected with the introduced nucleic acid molecule can be identified by drug selection (e.g., cells that have incorporated the selectable marker gene will survive, while the other cells die).

[0092] A host cell of the invention, such as a prokaryotic or eukaryotic host cell in culture, can be used to produce (i.e., express) a polypeptide of the invention. Accordingly, the invention further provides methods for producing a polypeptide using the host cells of the invention. In one embodiment, the method comprises culturing the host cell of invention (into which a recombinant expression vector encoding a polypeptide of the invention has been introduced) in a suitable medium such that the polypeptide is produced. In another embodiment, the method further comprises isolating the polypeptide from the medium or the host cell.

[0093] The host cells of the invention can also be used to produce nonhuman transgenic animals. For example, in one embodiment, a host cell of the invention is a fertilized oocyte or an embryonic stem cell into which a nucleic acid molecule of the invention has been introduced (e.g., an exogenous PDE4D gene, or an exogenous nucleic acid encoding PDE4D polypeptide). Such host cells can then be used to create non-human transgenic animals in which exogenous nucleotide sequences have been introduced into the genome or homologous recombinant animals in which endogenous nucleotide sequences have been altered. Such animals are useful for studying the function and/or activity of the nucleotide sequence and polypeptide encoded by the sequence and for identifying and/or evaluating modulators of their activity. As used herein, a “transgenic animal” is a non-human animal, preferably a mammal, more preferably a rodent such as a rat or mouse, in which one or more of the cells of the animal includes a transgene. Other examples of transgenic animals include non-human primates, sheep, dogs, cows, goats, chickens and amphibians. A transgene is exogenous DNA which is integrated into the genome of a cell from which a transgenic animal develops and which remains in the genome of the mature animal, thereby directing the expression of an encoded gene product in one or more cell types or tissues of the transgenic animal. As used herein, an “homologous recombinant animal” is a non-human animal, preferably a mammal, more preferably a mouse, in which an endogenous gene has been altered by homologous recombination between the endogenous gene and an exogenous DNA molecule introduced into a cell of the animal, e.g., an embryonic cell of the animal, prior to development of the animal.

[0094] Methods for generating transgenic animals via embryo manipulation and microinjection, particularly animals such as mice, have become conventional in the art and are described, for example, in U.S. Pat. Nos. 4,736,866 and 4,870,009, U.S. Pat. No. 4,873,191 and in Hogan, Manipulating the Mouse Embryo (Cold Spring Harbor Laboratory Press, Cold Spring Harbor, N.Y., 1986). Methods for constructing homologous recombination vectors and homologous recombinant animals are described further in Bradley (1991) Current Opinion in Bio/Technology, 2:823-829 and in PCT Publication Nos. WO 90/11354, WO 91/01140, WO 92/0968, and WO 93/04169. Clones of the non-human transgenic animals described herein can also be produced according to the methods described in Wilmut et al. (1997) Nature, 385:810-813 and PCT Publication Nos. WO 97/07668 and WO 97/07669.

[0095] Polypeptides of the Invention

[0096] The present invention also pertains to isolated polypeptides encoded by PDE4D (“PDE4D polypeptides”) and fragments and variants thereof, as well as polypeptides encoded by nucleotide sequences described herein (e.g., other splicing variants). The term “polypeptide” refers to a polymer of amino acids, and not to a specific length; thus, peptides, oligopeptides and proteins are included within the definition of a polypeptide. As used herein, a polypeptide is said to be “isolated” or “purified” when it is substantially free of cellular material when it is isolated from recombinant and non-recombinant cells, or free of chemical precursors or other chemicals when it is chemically synthesized. A polypeptide, however, can be joined to another polypeptide with which it is not normally associated in a cell (e.g., in a “fusion protein”) and still be “isolated” or “purified.”

[0097] The polypeptides of the invention can be purified to homogeneity. It is understood, however, that preparations in which the polypeptide is not purified to homogeneity are useful. The critical feature is that the preparation allows for the desired function of the polypeptide, even in the presence of considerable amounts of other components. Thus, the invention encompasses various degrees of purity. In one embodiment, the language “substantially free of cellular material” includes preparations of the polypeptide having less than about 30% (by dry weight) other proteins (i.e., contaminating protein), less than about 20% other proteins, less than about 10% other proteins, or less than about 5% other proteins.

[0098] When a polypeptide is recombinantly produced, it can also be substantially free of culture medium, i.e., culture medium represents less than about 20%, less than about 10%, or less than about 5% of the volume of the polypeptide preparation. The language “substantially free of chemical precursors or other chemicals” includes preparations of the polypeptide in which it is separated from chemical precursors or other chemicals that are involved in its synthesis. In one embodiment, the language “substantially free of chemical precursors or other chemicals” includes preparations of the polypeptide having less than about 30% (by dry weight) chemical precursors or other chemicals, less than about 20% chemical precursors or other chemicals, less than about 10% chemical precursors or other chemicals, or less than about 5% chemical precursors or other chemicals.

[0099] In one embodiment, a polypeptide of the invention comprises an amino acid sequence encoded by a nucleic acid molecule comprising a nucleotide sequence selected from the group consisting of SEQ ID NO: 1 which may optionally comprise at least one polymorphism shown in Tables 9 and 10 and complements and portions thereof, e.g., SEQ ID NO: 2, 3, 4, 5, 6, 7, 8, 9, 10, 12 or 14, or a portion or polymorphic variant thereof. However, the polypeptides of the invention also encompass fragment and sequence variants. Variants include a substantially homologous polypeptide encoded by the same genetic locus in an organism, i.e., an allelic variant, as well as other splicing variants. Variants also encompass polypeptides derived from other genetic loci in an organism, but having substantial homology to a polypeptide encoded by a nucleic acid molecule comprising a nucleotide sequence selected from the group consisting of SEQ ID NO: 1 which may optionally comprise at least one polymorphism shown in Tables 9 and 10 and complements and portions thereof, or having substantial homology to a polypeptide encoded by a nucleic acid molecule comprising a nucleotide sequence selected from the group consisting of nucleotide sequences encoding SEQ ID NO: 2, 3, 4, 5, 6, 7, 8, 9, 10, 12 or 14, or polymorphic variants thereof. Variants also include polypeptides substantially homologous or identical to these polypeptides but derived from another organism, i.e., an ortholog. Variants also include polypeptides that are substantially homologous or identical to these polypeptides that are produced by chemical synthesis. Variants also include polypeptides that are substantially homologous or identical to these polypeptides that are produced by recombinant methods.

[0100] As used herein, two polypeptides (or a region of the polypeptides) are substantially homologous or identical when the amino acid sequences are at least about 45-55%, in certain embodiments at least about 70-75%, and in other embodiments at least about 80-85%, and in others greater than about 90% or more homologous or identical. A substantially homologous amino acid sequence, according to the present invention, will be encoded by a nucleic acid molecule hybridizing to SEQ ID NO: 1 which may optionally comprise at least one polymorphism shown in Tables 9 and 10, or portion thereof, under stringent conditions as more particularly described above, or will be encoded by a nucleic acid molecule hybridizing to a nucleic acid sequence encoding SEQ ID NO: 2, 3, 4, 5, 6, 7, 8, 9, 10, 12 or 14, portion thereof or polymorphic variant thereof, under stringent conditions as more particularly described thereof.

[0101] The invention also encompasses polypeptides having a lower degree of identity but having sufficient similarity so as to perform one or more of the same functions performed by a polypeptide encoded by a nucleic acid molecule of the invention. Similarity is determined by conserved amino acid substitution. Such substitutions are those that substitute a given amino acid in a polypeptide by another amino acid of like characteristics. Conservative substitutions are likely to be phenotypically silent. Typically seen as conservative substitutions are the replacements, one for another, among the aliphatic amino acids Ala, Val, Leu and Ile; interchange of the hydroxyl residues Ser and Thr, exchange of the acidic residues Asp and Glu, substitution between the amide residues Asn and Gln, exchange of the basic residues Lys and Arg and replacements among the aromatic residues Phe and Tyr. Guidance concerning which amino acid changes are likely to be phenotypically silent are found in Bowie et al., Science 247:1306-1310 (1990).

[0102] A variant polypeptide can differ in amino acid sequence by one or more substitutions, deletions, insertions, inversions, fusions, and truncations or a combination of any of these. Further, variant polypeptides can be fully functional or can lack function in one or more activities. Fully functional variants typically contain only conservative variation or variation in non-critical residues or in non-critical regions. Functional variants can also contain substitution of similar amino acids that result in no change or an insignificant change in function. Alternatively, such substitutions may positively or negatively affect function to some degree. Non-functional variants typically contain one or more non-conservative amino acid substitutions, deletions, insertions, inversions, or truncation or a substitution, insertion, inversion, or deletion in a critical residue or critical region.

[0103] Amino acids that are essential for function can be identified by methods known in the art, such as site-directed mutagenesis or alanine-scanning mutagenesis (Cunningham et al., Science, 244:1081-1085 (1989)). The latter procedure introduces single alanine mutations at every residue in the molecule. The resulting mutant molecules are then tested for biological activity in vitro, or in vitro proliferative activity. Sites that are critical for polypeptide activity can also be determined by structural analysis such as crystallization, nuclear magnetic resonance or photoaffinity labeling (Smith et al., J. Mol. Biol., 224:899-904 (1992); de Vos et al., Science, 255:306-312 (1992)).

[0104] The invention also includes polypeptide fragments of the polypeptides of the invention. Fragments can be derived from a polypeptide encoded by a nucleic acid molecule comprising SEQ ID NO: 1 which may optionally comprise at least one polymorphism shown in Tables 9 and 10 or a portion thereof and the complements thereof (e.g., SEQ ID NO: 2, 3, 4, 5, 6, 7, 8, 9, 10, 12 or 14, or other splicing variants). However, the invention also encompasses fragments of the variants of the polypeptides described herein. As used herein, a fragment comprises at least 6 contiguous amino acids. Useful fragments include those that retain one or more of the biological activities of the polypeptide as well as fragments that can be used as an immunogen to generate polypeptide-specific antibodies.

[0105] Biologically active fragments (peptides which are, for example, 6, 9, 12, 15, 16, 20, 30, 35, 36, 37, 38, 39, 40, 50, 100 or more amino acids in length) can comprise a domain, segment, or motif that has been identified by analysis of the polypeptide sequence using well-known methods, e.g., signal peptides, extracellular domains, one or more transmembrane segments or loops, ligand binding regions, zinc finger domains, DNA binding domains, acylation sites, glycosylation sites, or phosphorylation sites.

[0106] Fragments can be discrete (not fused to other amino acids or polypeptides) or can be within a larger polypeptide. Further, several fragments can be comprised within a single larger polypeptide. In one embodiment a fragment designed for expression in a host can have heterologous pre- and pro-polypeptide regions fused to the amino terminus of the polypeptide fragment and an additional region fused to the carboxyl terminus of the fragment.

[0107] The invention thus provides chimeric or fusion polypeptides. These comprise a polypeptide of the invention operatively linked to a heterologous protein or polypeptide having an amino acid sequence not substantially homologous to the polypeptide. “Operatively linked” indicates that the polypeptide and the heterologous protein are fused in-frame. The heterologous protein can be fused to the N-terminus or C-terminus of the polypeptide. In one embodiment the fusion polypeptide does not affect function of the polypeptide per se. For example, the fusion polypeptide can be a GST-fusion polypeptide in which the polypeptide sequences are fused to the C-terminus of the GST sequences. Other types of fusion polypeptides include, but are not limited to, enzymatic fusion polypeptides, for example β-galactosidase fusions, yeast two-hybrid GAL fusions, poly-His fusions and Ig fusions. Such fusion polypeptides, particularly poly-His fusions, can facilitate the purification of recombinant polypeptide. In certain host cells (e.g. mammalian host cells), expression and/or secretion of a polypeptide can be increased by using a heterologous signal sequence. Therefore, in another embodiment, the fusion polypeptide contains a heterologous signal sequence at its N-terminus.

[0108] EP-A-O 464 533 discloses fusion proteins comprising various portions of immunoglobulin constant regions. The Fc is useful in therapy and diagnosis and thus results, for example, in improved pharmacokinetic properties (EP-A 0232 262). In drug discovery, for example, human proteins have been fused with Fc portions for the purpose of high-throughput screening assays to identify antagonists. Bennett et al., Journal of Molecular Recognition, 8:52-58 (1995) and Johanson et al., The Journal of Biological Chemistry, 270, 16:9459-9471 (1995). Thus, this invention also encompasses soluble fusion polypeptides containing a polypeptide of the invention and various portions of the constant regions of heavy or light chains of immunoglobulins of various subclass (IgG, IgM, IgA, IgE).

[0109] A chimeric or fusion polypeptide can be produced by standard recombinant DNA techniques. For example, DNA fragments coding for the different polypeptide sequences are ligated together in-frame in accordance with conventional techniques. In another embodiment, the fusion gene can be synthesized by conventional techniques including automated DNA synthesizers. Alternatively, PCR amplification of nucleic acid fragments can be carried out using anchor primers which give rise to complementary overhangs between two consecutive nucleic acid fragments which can subsequently be annealed and re-amplified to generate a chimeric nucleic acid sequence (see Ausubel et al., Current Protocols in Molecular Biology, 1992). Moreover, many expression vectors are commercially available that already encode a fusion moiety (e.g., a GST protein). A nucleic acid molecule encoding a polypeptide of the invention can be cloned into such an expression vector such that the fusion moiety is linked in-frame to the polypeptide.

[0110] The isolated polypeptide can be purified from cells that naturally express it, purified from cells that have been altered to express it (recombinant), or synthesized using-known protein synthesis methods. In one embodiment, the polypeptide is produced by recombinant DNA techniques. For example, a nucleic acid molecule encoding the polypeptide is cloned into an expression vector, the expression vector introduced into a host cell and the polypeptide expressed in the host cell. The polypeptide can then be isolated from the cells by an appropriate purification scheme using standard protein purification techniques.

[0111] In general, polypeptides of the present invention can be used as a molecular weight marker on SDS-PAGE gels or on molecular sieve gel filtration columns using art-recognized methods. The polypeptides of the present invention can be used to raise antibodies or to elicit an immune response. The polypeptides can also be used as a reagent, e.g., a labeled reagent, in assays to quantitatively determine levels of the polypeptide or a molecule to which it binds (e.g., a receptor or a ligand) in biological fluids. The polypeptides can also be used as markers for cells or tissues in which the corresponding polypeptide is preferentially expressed, either constitutively, during tissue differentiation, or in a diseased state. The polypeptides can be used to isolate a corresponding binding agent, e.g., receptor or ligand, such as, for example, in an interaction trap assay, and to screen for peptide or small molecule antagonists or agonists of the binding interaction.

[0112] Antibodies of the Invention

[0113] Polyclonal and/or monoclonal antibodies that specifically bind one form of the gene product but not to the other form of the gene product are also provided. Antibodies are also provided that bind a portion of either the variant or the reference gene product that contains the polymorphic site or sites. The invention provides antibodies to the polypeptides and polypeptide fragments of the invention, e.g., having an amino acid sequence encoded by SEQ ID NO: 2, 3, 4, 5, 6, 7, 8, 9, 10, 12 or 14, or a portion thereof, or having an amino acid sequence encoded by a nucleic acid molecule comprising all or a portion of SEQ ID NO: 1 which may optionally comprise at least one polymorphism shown in Tables 9 and 10 (e.g., SEQ ID NO: 2, 3, 4, 5, 6, 7, 8, 9, 10, 12 or 14, or another splicing variant or portion thereof). The term “antibody” as used herein refers to immunoglobulin molecules and immunologically active portions of immunoglobulin molecules, i.e., molecules that contain an antigen binding site that specifically binds an antigen. A molecule that specifically binds to a polypeptide of the invention is a molecule that binds to that polypeptide or a fragment thereof, but does not substantially bind other molecules in a sample, e.g., a biological sample, which naturally contains the polypeptide. Examples of immunologically active portions of immunoglobulin molecules include F(ab) and F(ab′)₂ fragments which can be generated by treating the antibody with an enzyme such as pepsin. The invention provides polyclonal and monoclonal antibodies that bind to a polypeptide of the invention. The term “monoclonal antibody” or “monoclonal antibody composition”, as used herein, refers to a population of antibody molecules that contain only one species of an antigen binding site capable of immunoreacting with a particular epitope of a polypeptide of the invention. A monoclonal antibody composition thus typically displays a single binding affinity for a particular polypeptide of the invention with which it immunoreacts.

[0114] Polyclonal antibodies can be prepared as described above by immunizing a suitable subject with a desired immunogen, e.g., polypeptide of the invention or fragment thereof. The antibody titer in the immunized subject can be monitored over time by standard techniques, such as with an enzyme linked immunosorbent assay (ELISA) using immobilized polypeptide. If desired, the antibody molecules directed against the polypeptide can be isolated from the mammal (e.g., from the blood) and further purified by well-known techniques, such as protein A chromatography to obtain the IgG fraction. At an appropriate time after immunization, e.g., when the antibody titers are highest, antibody-producing cells can be obtained from the subject and used to prepare monoclonal antibodies by standard techniques, such as the hybridoma technique originally described by Kohler and Milstein (1975) Nature, 256:495-497, the human B cell hybridoma technique (Kozbor et al. (1983) Immunol. Today, 4:72), the EBV-hybridoma technique (Cole et al. (1985), Monoclonal Antibodies and Cancer Therapy, Alan R. Liss, Inc., pp. 77-96) or trioma techniques. The technology for producing hybridomas is well known (see generally Current Protocols in Immunology (1994) Coligan et al. (eds.) John Wiley & Sons, Inc., New York, N.Y.). Briefly, an immortal cell line (typically a myeloma) is fused to lymphocytes (typically splenocytes) from a mammal immunized with an immunogen as described above, and the culture supernatants of the resulting hybridoma cells are screened to identify a hybridoma producing a monoclonal antibody that binds a polypeptide of the invention.

[0115] Any of the many well known protocols used for fusing lymphocytes and immortalized cell lines can be applied for the purpose of generating a monoclonal antibody to a polypeptide of the invention (see, e.g., Current Protocols in Immunology, supra; Galfre et al. (1977) Nature, 266:55052; R. H. Kenneth, in Monoclonal Antibodies: A New Dimension In Biological Analyses, Plenum Publishing Corp., New York, N.Y. (1980); and Lerner (1981) Yale J. Biol. Med., 54:387-402. Moreover, the ordinarily skilled worker will appreciate that there are many variations of such methods that also would be useful.

[0116] Alternative to preparing monoclonal antibody-secreting hybridomas, a monoclonal antibody to a polypeptide of the invention can be identified and isolated by screening a recombinant combinatorial immunoglobulin library (e.g., an antibody phage display library) with the polypeptide to thereby isolate immunoglobulin library members that bind the polypeptide. Kits for generating and screening phage display libraries are commercially available (e.g., the Pharmacia Recombinant Phage Antibody System, Catalog No. 27-9400-01; and the Stratagene SurfZAP™ Phage Display Kit, Catalog No. 240612). Additionally, examples of methods and reagents particularly amenable for use in generating and screening antibody display library can be found in, for example, U.S. Pat. No. 5,223,409; PCT Publication No. WO 92/18619; PCT Publication No. WO 91/17271; PCT Publication No. WO 92/20791; PCT Publication No. WO 92/15679; PCT Publication No. WO 93/01288; PCT Publication No. WO 92/01047; PCT Publication No. WO 92/09690; PCT Publication No. WO 90/02809; Fuchs et al. (1991) Bio/Technology, 9:1370-1372; Hay et al. (1992) Hum. Antibod. Hybridomas, 3:81-85; Huse et al. (1989) Science, 246:1275-1281; Griffiths et al. (1993) EMBO J., 12:725-734.

[0117] Additionally, recombinant antibodies, such as chimeric and humanized monoclonal antibodies, comprising both human and non-human portions, which can be made using standard recombinant DNA techniques, are within the scope of the invention. Such chimeric and humanized monoclonal antibodies can be produced by recombinant DNA techniques known in the art.

[0118] In general, antibodies of the invention (e.g., a monoclonal antibody) can be used to isolate a polypeptide of the invention by standard techniques, such as affinity chromatography or immunoprecipitation. A polypeptide-specific antibody can facilitate the purification of natural polypeptide from cells and of recombinantly produced polypeptide expressed in host cells. Moreover, an antibody specific for a polypeptide of the invention can be used to detect the polypeptide (e.g., in a cellular lysate, cell supernatant, or tissue sample) in order to evaluate the abundance and pattern of expression of the polypeptide. Antibodies can be used diagnostically to monitor protein levels in tissue as part of a clinical testing procedure, e.g., to, for example, determine the efficacy of a given treatment regimen. Detection can be facilitated by coupling the antibody to a detectable substance. Examples of detectable substances include various enzymes, prosthetic groups, fluorescent materials, luminescent materials, bioluminescent materials, and radioactive materials. Examples of suitable enzymes include horseradish peroxidase, alkaline phosphatase, β-galactosidase, or acetylcholinesterase; examples of suitable prosthetic group complexes include streptavidin/biotin and avidin/biotin; examples of suitable fluorescent materials include umbelliferone, fluorescein, fluorescein isothiocyanate, rhodamine, dichlorotriazinylamine fluorescein, dansyl chloride or phycoerythrin; an example of a luminescent material includes luminol; examples of bioluminescent materials include luciferase, luciferin, and aequorin, and examples of suitable radioactive material include ¹²⁵I, 131I, 35S or 3H.

[0119] Diagnostic Assays

[0120] The nucleic acids, probes, primers, polypeptides and antibodies described herein can be used in methods of diagnosis of stroke or diagnosis of a susceptibility to stroke or to a disease or condition associated with an stroke gene, such as PDE4D, as well as in kits useful for diagnosis of stroke or a susceptibility to stroke or to a disease or condition associated with PDE4D. In one embodiment, the kit useful for diagnosis of stroke or susceptibility to stroke, or to a disease or condition associated with PDE4D comprises primers as described herein, wherein the primers contain one or more of the SNPs identified herein. In parallel, definition of stroke risk associated with PDE4D/cAMP pathway is useful and novel to define subgroups of individuals who would be best treated by pharmaceutical agents acting on PDE4D and/cAMP pathways (and vice versa).

[0121] In one embodiment of the invention, diagnosis of stroke or susceptibility to stroke (or diagnosis of or susceptibility to a disease or condition associated with PDE4D), is made by detecting a polymorphism in a PDE4D nucleic acid as described herein. The polymorphism can be an alteration in a PDE4D nucleic acid, such as the insertion or deletion of a single nucleotide, or of more than one nucleotide, resulting in a frame shift alteration; the change of at least one nucleotide, resulting in a change in the encoded amino acid; the change of at least one nucleotide, resulting in the generation of a premature stop codon; the deletion of several nucleotides, resulting in a deletion of one or more amino acids encoded by the nucleotides; the insertion of one or several nucleotides, such as by unequal recombination or gene conversion, resulting in an interruption of the coding sequence of the gene or nucleic acid; duplication of all or a part of the gene or nucleic acid; transposition of all or a part of the gene or nucleic acid; or rearrangement of all or a part of the gene or nucleic acid. More than one such alteration may be present in a single gene or nucleic acid. Such sequence changes cause an alteration in the polypeptide encoded by a PDE4D nucleic acid. For example, if the alteration is a frame shift alteration, the frame shift can result in a change in the encoded amino acids, and/or can result in the generation of a premature stop codon, causing generation of a truncated polypeptide. Alternatively, a polymorphism associated with a disease or condition associated with a PDE4D nucleic acid or a susceptibility to a disease or condition associated with a PDE4D nucleic acid can be a synonymous alteration in one or more nucleotides (i.e., an alteration that does not result in a change in the polypeptide encoded by a PDE4D nucleic acid). For diagnostic applications, there may be polymorphisms informative for prediction of disease risk that are in linkage disequilibrium with the functional polymorphism. Such a polymorphism may alter splicing sites, affect the stability or transport of mRNA, or otherwise affect the transcription or translation of the nucleic acid. A PDE4D nucleic acid that has any of the alteration described above is referred to herein as an “altered nucleic acid.”

[0122] In a first method of diagnosing stroke or a susceptibility to stroke, hybridization methods, such as Southern analysis, Northern analysis, or in situ hybridizations, can be used (see Current Protocols in Molecular Biology, Ausubel, F. et al., eds., John Wiley & Sons, including all supplements through 1999). For example, a biological sample from a test subject (a “test sample”) of genomic DNA, RNA, or cDNA, is obtained from an individual suspected of having, being susceptible to or predisposed for, or carrying a defect for, a susceptibility to a disease or condition associated with a PDE4D nucleic acid (the “test individual”). The individual can be an adult, child, or fetus. The test sample can be from any source which contains genomic DNA, such as a blood sample, sample of amniotic fluid, sample of cerebrospinal fluid, or tissue sample from skin, muscle, buccal or conjunctival mucosa, placenta, gastrointestinal tract or other organs. A test sample of DNA from fetal cells or tissue can be obtained by appropriate methods, such as by amniocentesis or chorionic villus sampling. The DNA, RNA, or cDNA sample is then examined to determine whether a polymorphism in an stroke nucleic acid is present, and/or to determine which splicing variant(s) encoded by the PDE4D is present. The presence of the polymorphism or splicing variant(s) can be indicated by hybridization of the nucleic acid in the genomic DNA, RNA, or cDNA to a nucleic acid probe. A “nucleic acid probe,” as used herein, can be a DNA probe or an RNA probe; the nucleic acid probe can contain at least one polymorphism in a PDE4D nucleic acid or contains a nucleic acid encoding a particular splicing variant of a PDE4D nucleic acid. The probe can be any of the nucleic acid molecules described above (e.g., the nucleic acid, a fragment, a vector comprising the nucleic acid, a probe or primer, etc.).

[0123] To diagnose a susceptibility to stroke, a hybridization sample is formed by contacting the test sample containing PDE4D, with at least one nucleic acid probe. A preferred probe for detecting mRNA or genomic DNA is a labeled nucleic acid probe capable of hybridizing to mRNA or genomic DNA sequences described herein. The nucleic acid probe can be, for example, a full-length nucleic acid molecule, or a portion thereof, such as an oligonucleotide of at least 15, 30, 50, 100, 250 or 500 nucleotides in length and sufficient to specifically hybridize under stringent conditions to appropriate mRNA or genomic DNA. For example, the nucleic acid probe can be all or a portion of SEQ ID NO:1 which may optionally comprise at least one polymorphism shown in Tables 9 and 10, or the complement thereof, or a portion thereof; or can be a nucleic acid encoding a portion of SEQ ID NO: 2, 3, 4, 5, 6, 7, 8, 9, 10, 12 or 14. Other suitable probes for use in the diagnostic assays of the invention are described above (see e.g., probes and primers discussed under the heading, “Nucleic Acids of the Invention”).

[0124] The hybridization sample is maintained under conditions which are sufficient to allow specific hybridization of the nucleic acid probe to PDE4D. “Specific hybridization”, as used herein, indicates exact hybridization (e.g., with no mismatches). Specific hybridization can be performed under high stringency conditions or moderate stringency conditions, for example, as described above. In a particularly preferred embodiment, the hybridization conditions for specific hybridization are high stringency.

[0125] Specific hybridization, if present, is then detected using standard methods. If specific hybridization occurs between the nucleic acid probe and PDE4D in the test sample, then PDE4D has the polymorphism, or is the splicing variant, that is present in the nucleic acid probe. More than one nucleic acid probe can also be used concurrently in this method. In one embodiment, specific hybridization of at least one of the nucleic acid probes is indicative of a polymorphism in PDE4D, or of the presence of a particular splicing variant encoding PDE4D and is therefore diagnostic for a susceptibility to stroke.

[0126] In Northern analysis (see Current Protocols in Molecular Biology, Ausubel, F. et al., eds., John Wiley & Sons, supra) the hybridization methods described above are used to identify the presence of a polymorphism or a particular splicing variant, associated with a susceptibility to stroke. For Northern analysis, a test sample of RNA is obtained from the individual by appropriate means. Specific hybridization of a nucleic acid probe, as described above, to RNA from the individual is indicative of a polymorphism in PDE4D, or of the presence of a particular splicing variant encoded by PDE4D, and is therefore diagnostic for a susceptibility to stroke.

[0127] For representative examples of use of nucleic acid probes, see, for example, U.S. Pat. Nos. 5,288,611 and 4,851,330.

[0128] Alternatively, a peptide nucleic acid (PNA) probe can be used instead of a nucleic acid probe in the hybridization methods described above. PNA is a DNA mimic having a peptide-like, inorganic backbone, such as N-(2-aminoethyl)glycine units, with an organic base (A, G, C, T or U) attached to the glycine nitrogen via a methylene carbonyl linker (see, for example, Nielsen, P. E. et al., Bioconjugate Chemistry, 1994, 5, American Chemical Society, p. 1 (1994). The PNA probe can be designed to specifically hybridize to a gene having a polymorphism associated with a susceptibility to stroke. Hybridization of the PNA probe to PDE4D is diagnostic for a susceptibility to stroke.

[0129] In another method of the invention, mutation analysis by restriction digestion can be used to detect a mutant gene, or genes containing a polymorphism(s), if the mutation or polymorphism in the gene results in the creation or elimination of a restriction site. A test sample containing genomic DNA is obtained from the individual. Nucleic acid amplification methods, including but not limited to Polymerase chain reaction (PCR), Transcription Mediated Amplifications (TMA), and Ligase Mediate Amplification (LMA), can be used to amplify PDE4D. The digestion pattern of the relevant DNA fragment indicates the presence or absence of the mutation or polymorphism in PDE4D, and therefore indicates the presence or absence of this susceptibility to stroke. RFLP analysis is conducted as described (see Current Protocols in Molecular Biology, supra). Amplification techniques based upon detection of sequence of interest using reverse dot blot technology (linear array or strips) can be used and are described, for example, in U.S. Pat. No. 5,468,613.

[0130] Sequence analysis can also be used to detect specific polymorphisms in PDE4D. A test sample of DNA or RNA is obtained from the test individual. PCR or other appropriate methods can be used to amplify the gene, and/or its flanking sequences, if desired. The sequence of PDE4D, or a fragment of the gene, or cDNA, or fragment of the cDNA, or mRNA, or fragment of the mRNA, is determined, using standard methods. The sequence of the gene, gene fragment, cDNA, cDNA fragment, mRNA, or mRNA fragment is compared with the known nucleic acid sequence of the gene, cDNA (e.g., SEQ ID NO: 1 which may optionally comprise at least one polymorphism shown in Tables 9 and 10, or a nucleic acid sequence encoding SEQ ID NO: 2, 3, 4, 5, 6, 7, 8, 9, 10, 12 or 14, or a fragment thereof) or mRNA, as appropriate. In one embodiment, the presence of at least one of the polymorphisms in PDE4D indicates that the individual has a susceptibility to stroke.

[0131] Allele-specific oligonucleotides can also be used to detect the presence of a polymorphism in PDE4D, through the use of dot-blot hybridization of amplified oligonucleotides with allele-specific oligonucleotide (ASO) probes (see, for example, Saiki, R. et al., (1986), Nature (London) 324:163-166). An “allele-specific oligonucleotide” (also referred to herein as an “allele-specific oligonucleotide probe”) is an oligonucleotide of approximately 10-50 base pairs, preferably approximately 15-30 base pairs, that specifically hybridizes to PDE4D, and that contains a polymorphism associated with a susceptibility to stroke. An allele-specific oligonucleotide probe that is specific for particular polymorphisms in PDE4D can be prepared, using standard methods (see Current Protocols in Molecular Biology, supra). To identify polymorphisms in the gene that are associated with a susceptibility to stroke, a test sample of DNA is obtained from the individual. PCR can be used to amplify all or a fragment of PDE4D, and its flanking sequences. The DNA containing the amplified PDE4D (or fragment of the gene) is dot-blotted, using standard methods (see Current Protocols in Molecular Biology, supra), and the blot is contacted with the oligonucleotide probe. The presence of specific hybridization of the probe to the amplified PDE4D is then detected. Specific hybridization of an allele-specific oligonucleotide probe to DNA from the individual is indicative of a polymorphism in PDE4D, and is therefore indicative of a susceptibility to stroke.

[0132] The invention further provides allele-specific oligonucleotides that hybridize to the reference or variant allele of a nucleic acid comprising a single nucleotide polymorphism or to the complement thereof. These oligonucleotides can be probes or primers.

[0133] An allele-specific primer hybridizes to a site on target DNA overlapping a polymorphism and only primes amplification of an allelic form to which the primer exhibits perfect complementarity. See Gibbs, Nucleic Acid Res. 17, 2427-2448 (1989). This primer is used in conjunction with a second primer that hybridizes at a distal site. Amplification proceeds from the two primers, resulting in a detectable product that indicates the particular allelic form is present. A control is usually performed with a second pair of primers, one of which shows a single base mismatch at the polymorphic site and the other of which exhibits perfect complementarity to a distal site. The single-base mismatch prevents amplification and no detectable product is formed. The method works best when the mismatch is included in the 3′-most position of the oligonucleotide aligned with the polymorphism because this position is most destabilizing to elongation from the primer (see, e.g., WO 93/22456).

[0134] With the addition of such analogs as locked nucleic acids (LNAs), the size of primers and probes can be reduced to as few as 8 bases. LNAs are a novel class of bicyclic DNA analogs in which the 2′ and 4′ positions in the furanose ring are joined via an O-methylene (oxy-LNA), S-methylene (thio-LNA), or amino methylene (amino-LNA) moiety. Common to all of these LNA variants is an affinity toward complementary nucleic acids, which is by far the highest reported for a DNA analog. For example, particular all oxy-LNA nonamers have been shown to have melting temperatures of 64° C. and 74° C. when in complex with complementary DNA or RNA, respectively, as opposed to 28° C. for both DNA and RNA for the corresponding DNA nonamer. Substantial increases in Tₘ are also obtained when LNA monomers are used in combination with standard DNA or RNA monomers. For primers and probes, depending on where the LNA monomers are included (e.g., the 3′ end, the 5′end, or in the middle), the Tₘ could be increased considerably.

[0135] In another embodiment, arrays of oligonucleotide probes that are complementary to target nucleic acid sequence segments from an individual, can be used to identify polymorphisms in PDE4D. For example, in one embodiment, an oligonucleotide linear array can be used. Oligonucleotide arrays typically comprise a plurality of different oligonucleotide probes that are coupled to a surface of a substrate in different known locations. These oligonucleotide arrays, also described as “Genechips.TM.,” have been generally described in the art, for example, U.S. Pat. No. 5,143,854 and PCT patent publication Nos. WO 90/15070 and 92/10092. These arrays can generally be produced using mechanical synthesis methods or light directed synthesis methods that incorporate a combination of photolithographic methods and solid phase oligonucleotide synthesis methods. See Fodor et al., Science, 251:767-777 (1991), Pirrung et al., U.S. Pat. No. 5,143,854 (see also PCT Application No. WO 90/15070) and Fodor et al., PCT Publication No. WO 92/10092 and U.S. Pat. No. 5,424,186, the entire teachings of each of which are incorporated by reference herein. Techniques for the synthesis of these arrays using mechanical synthesis methods are described in, e.g., U.S. Pat. No. 5,384,261, the entire teachings of which are incorporated by reference herein. In another embodiment, linear arrays or microarrays can be utilized.

[0136] Once an oligonucleotide array is prepared, a nucleic acid of interest is hybridized with the array and scanned for polymorphisms. Hybridization and scanning are generally carried out by methods described herein and also in, e.g., Published PCT Application Nos. WO 92/10092 and WO 95/11995, and U.S. Pat. No. 5,424,186, the entire teachings of which are incorporated by reference herein. In brief, a target nucleic acid sequence that includes one or more previously identified polymorphic markers is amplified by well known amplification techniques, e.g., PCR. Typically, this involves the use of primer sequences that are complementary to the two strands of the target sequence both upstream and downstream from the polymorphism. Asymmetric PCR techniques may also be used. Amplified target, generally incorporating a label, is then hybridized with the array under appropriate conditions. Upon completion of hybridization and washing of the array, the array is scanned to determine the position on the array to which the target sequence hybridizes. The hybridization data obtained from the scan is typically in the form of fluorescence intensities as a function of location on the array.

[0137] Although primarily described in terms of a single detection block, e.g., for detection of a single polymorphism, arrays can include multiple detection blocks, and thus be capable of analyzing multiple, specific polymorphisms. In alternate arrangements, it will generally be understood that detection blocks may be grouped within a single array or in multiple, separate arrays so that varying, optimal conditions may be used during the hybridization of the target to the array. For example, it may often be desirable to provide for the detection of those polymorphisms that fall within G-C rich stretches of a genomic sequence, separately from those falling in A-T rich segments. This allows for the separate optimization of hybridization conditions for each situation.

[0138] Additional description of use of oligonucleotide arrays for detection of polymorphisms can be found, for example, in U.S. Pat. Nos. 5,858,659 and 5,837,832, the entire teachings of which are incorporated by reference herein.

[0139] Other methods of nucleic acid analysis can be used to detect polymorphisms in PDE4D or splicing variants encoding by PDE4D. Representative methods include direct manual sequencing (Church and Gilbert, (1988), Proc. Natl. Acad. Sci. USA 81:1991-1995; Sanger, F. et al. (1977) Proc. Natl. Acad. Sci. 74:5463-5467; Beavis et al., U.S. Pat. No. 5,288,644); automated fluorescent sequencing; single-stranded conformation polymorphism assays (SSCP); clamped denaturing gel electrophoresis (CDGE); denaturing gradient gel electrophoresis (DGGE) (Sheffield, V. C. et al. (19891) Proc. Natl. Acad. Sci. USA 86:232-236), mobility shift analysis (Orita, M. et al. (1989) Proc. Natl. Acad. Sci. USA 86:2766-2770), restriction enzyme analysis (Flavell et al. (1978) Cell 15:25; Geever, et al. (1981) Proc. Natl. Acad. Sci. USA 78:5081); heteroduplex analysis; chemical mismatch cleavage (CMC) (Cotton et al. (1985) Proc. Natl. Acad. Sci. USA 85:4397-4401); RNase protection assays (Myers, R. M. et al. (1985) Science 230:1242); use of polypeptides which recognize nucleotide mismatches, such as E. coli mutS protein, for example.

[0140] In one embodiment of the invention, diagnosis of a disease or condition associated with PDE4D (e.g., stroke) or a susceptibility to a disease or condition associated with PDE4D (e.g., stroke) can also be made by expression analysis by quantitative PCR (kinetic thermal cycling). This technique utilizing TaqMan® can be used to allow the identification of polymorphisms and whether a patient is homozygous or heterozygous. The technique can assess the presence of an alteration in the expression or composition of the polypeptide encoded by a PDE4D nucleic acid or splicing variants encoded by a PDE4D nucleic acid. Further, the expression of the variants can be quantified as physically or functionally different.

[0141] In another embodiment of the invention, diagnosis of a susceptibility to stroke can also be made by examining expression and/or composition of an PDE4D polypeptide, by a variety of methods, including enzyme linked immunosorbent assays (ELISAs), Western blots, immunoprecipitations and immunofluorescence. A test sample from an individual is assessed for the presence of an alteration in the expression and/or an alteration in composition of the polypeptide encoded by PDE4D, or for the presence of a particular variant (e.g., an isoform) encoded by PDE4D. An alteration in expression of a polypeptide encoded by PDE4D can be, for example, an alteration in the quantitative polypeptide expression (i.e., the amount of polypeptide produced); an alteration in the composition of a polypeptide encoded by PDE4D is an alteration in the qualitative polypeptide expression (e.g., expression of a mutant PDE4D polypeptide or of a different splicing variant or isoform). In a preferred embodiment, detecting a particular splicing variant encoded by that PDE4D, or a particular pattern of splicing variants makes diagnosis of the disease or condition associated with PDE4D or a susceptibility to a disease or condition associated with PDE4D.

[0142] Both such alterations (quantitative and qualitative) can also be present. An “alteration” in the polypeptide expression or composition, as used herein, refers to an alteration in expression or composition in a test sample, as compared with the expression or composition of polypeptide by PDE4D in a control sample. A control sample is a sample that corresponds to the test sample (e.g., is from the same type of cells), and is from an individual who is not affected by stroke. An alteration in the expression or composition of the polypeptide in the test sample, as compared with the control sample, is indicative of a susceptibility to stroke. Similarly, the presence of one or more different splicing variants or isoforms in the test sample, or the presence of significantly different amounts of different splicing variants in the test sample, as compared with the control sample, is indicative of a susceptibility to stroke. Various means of examining expression or composition of the polypeptide encoded by PDE4D can be used, including spectroscopy, colorimetry, electrophoresis, isoelectric focusing, and immunoassays (e.g., David et al, U.S. Pat. No. 4,376,110) such as immunoblotting (see also Current Protocols in Molecular Biology, particularly chapter 10). For example, in one embodiment, an antibody capable of binding to the polypeptide (e.g., as described above), preferably an antibody with a detectable label, can be used. Antibodies can be polyclonal, or more preferably, monoclonal. An intact antibody, or a fragment thereof (e.g., Fab or F(ab′)₂) can be used. The term “labeled”, with regard to the probe or antibody, is intended to encompass direct labeling of the probe or antibody by coupling (i.e., physically linking) a detectable substance to the probe or antibody, as well as indirect labeling of the probe or antibody by reactivity with another reagent that is directly labeled. Examples of indirect labeling include detection of a primary antibody using a fluorescently labeled secondary antibody and end-labeling of a DNA probe with biotin such that it can be detected with fluorescently labeled streptavidin.

[0143] Western blotting analysis, using an antibody as described above that specifically binds to a polypeptide encoded by a mutant PDE4D, or an antibody that specifically binds to a polypeptide encoded by a non-mutant gene, or an antibody that specifically binds to a particular splicing variant encoded by PDE4D, can be used to identify the presence in a test sample of a particular splicing variant or isoform, or of a polypeptide encoded by a polymorphic or mutant PDE4D, or the absence in a test sample of a particular splicing variant or isoform, or of a polypeptide encoded by a non-polymorphic or non-mutant gene. The presence of a polypeptide encoded by a polymorphic or mutant gene, or the absence of a polypeptide encoded by a non-polymorphic or non-mutant gene, is diagnostic for a susceptibility to stroke, as is the presence (or absence) of particular splicing variants encoded by the PDE4D gene.

[0144] In one embodiment of this method, the level or amount of polypeptide encoded by PDE4D in a test sample is compared with the level or amount of the polypeptide encoded by PDE4D in a control sample. A level or amount of the polypeptide in the test sample that is higher or lower than the level or amount of the polypeptide in the control sample, such that the difference is statistically significant, is indicative of an alteration in the expression of the polypeptide encoded by PDE4D, and is diagnostic for a susceptibility to stroke. Alternatively, the composition of the polypeptide encoded by PDE4D in a test sample is compared with the composition of the polypeptide encoded by PDE4D in a control sample (e.g., the presence of different splicing variants). A difference in the composition of the polypeptide in the test sample, as compared with the composition of the polypeptide in the control sample, is diagnostic for a susceptibility to stroke. In another embodiment, both the level or amount and the composition of the polypeptide can be assessed in the test sample and in the control sample. A difference in the amount or level of the polypeptide in the test sample, compared to the control sample; a difference in composition in the test sample, compared to the control sample; or both a difference in the amount or level, and a difference in the composition, is indicative of a susceptibility to stroke.

[0145] In another embodiment, assessment of the splicing variant or isoform(s) of a polypeptide encoded by a polymorphic or mutant PDE4D, can be performed. The assessment can be performed directly (e.g., by examining the polypeptide itself), or indirectly (e.g., by examining the mRNA encoding the polypeptide, such as through mRNA profiling). For example, probes or primers as described herein can be used to determine which splicing variants or isoforms are encoded by PDE4D mRNA, using standard methods.

[0146] The presence in a test sample of a particular splicing variant(s) or isoform(s) associated with stroke or risk of stroke, or the absence in a test sample of a particular splicing variant(s) or isoform(s) not associated with stroke or risk of stroke, is diagnostic for a disease or condition associated with a PDE4D gene or a susceptibility to a disease or condition associated with a PDE4D gene. Similarly, the absence in a test sample of a particular splicing variant(s) or isoform(s) associated with stroke or risk of stroke, or the presence in a test sample of a particular splicing variant(s) or isoform(s) not associated with stroke or risk of stroke, is diagnostic for the absence of disease or condition associated with a PDE4D gene or a susceptibility to a disease or condition associated with a PDE4D gene.

[0147] In a preferred embodiment, differential expression of isoforms PDE4D7A, PDE4D9 and combinations thereof can be assessed and compared to control individuals. Decrease expression of these isoforms is indicative of susceptibility to stroke, particularly carotid stroke and/or cardiogenic stroke.

[0148] The invention further pertains to a method for the diagnosis and identification of susceptibility to stroke in an individual, by identifying an at-risk haplotype in PDE4D. In one embodiment, the at-risk haplotype is a haplotype for which the presence of the haplotype increases the risk of stroke significantly. Although it is to be understood that identifying whether a risk is significant may depend on a variety of factors, including the specific disease, the haplotype, and often, environmental factors, the significance may be measured by an odds ratio or a percentage. In a further embodiment, the significance is measured by a percentage. In one embodiment, a significant risk is measured as an odds ratio of at least about 1.2, including by not limited to: 1.2, 1.3, 1.4, 1.5, 1.6, 1.7, 1.8 and 1.9. In a further embodiment, an odds ratio of at least 1.2 is significant. In a further embodiment, an odds ratio of at least about 1.5 is significant. In a further embodiment, a significant increase in risk is at least about 1.7 is significant. In a further embodiment, a significant increase in risk is at least about 20%, including but not limited to about 25%, 30%, 35%, 40%, 45%, 50%, 55%, 60%, 65%, 70%, 75%, 80%, 85%, 90%, 95% and 98%. In a further embodiment, a significant increase in risk is at least about 50%. It is understood however, that identifying whether a risk is medically significant may also depend on a variety of factors, including the specific disease, the haplotype, and often, environmental factors.

[0149] The invention also pertains to methods of diagnosing stroke or a susceptibility to stroke in an individual, comprising screening for an at-risk haplotype in the PDE4D nucleic acid that is more frequently present in an individual susceptible to stroke (affected), compared to the frequency of its presence in a healthy individual (control), wherein the presence of the haplotype is indicative of stroke or susceptibility to stroke. Standard techniques for genotyping for the presence of SNPs and/or microsatellite markers that are associated with stroke can be used, such as fluorescent-based techniques (Chen, et al., Genome Res. 9, 492 (1999), PCR, LCR, Nested PCR and other techniques for nucleic acid amplification. In a preferred embodiment, the method comprises assessing in an individual the presence or frequency of SNPs and/or microsatellites in the PDE4D nucleic acid that are associated with stroke, wherein an excess or higher frequency of the SNPs and/or microsatellites compared to a healthy control individual is indicative that the individual has stroke or is susceptible to stroke.

[0150] See Table 6A, Table 6B and Table 7 for SNPs and markers that comprise haplotypes that can be used as screening tools. See also Tables 6A and 6B that set forth previously known and novel microsatellite markers and their counterpart sequence ID reference numbers. SNPs and markers from these lists represent at-risk haplotypes and can be used to design diagnostic tests for determining a susceptibility to stroke.

[0151] Kits (e.g., reagent kits) useful in the methods of diagnosis comprise components useful in any of the methods described herein, including for example, hybridization probes or primers as described herein (e.g., labeled probes or primers), reagents for detection of labeled molecules, restriction enzymes (e.g., for RFLP analysis), allele-specific oligonucleotides, antibodies which bind to altered or to non-altered (native) PDE4D polypeptide, means for amplification of nucleic acids comprising PDE4D, or means for analyzing the nucleic acid sequence of PDE4D or for analyzing the amino acid sequence of an PDE4D polypeptide, etc. In one embodiment, a kit for diagnosing susceptibility to stroke can comprise primers for nucleic acid amplification of a region in the PDE4D gene comprising an at-risk haplotype that is more frequently present in an individual susceptible to stroke. The primers can be designed using portions of the nucleic acids flanking SNPs that are indicative of stroke. In a particularly preferred embodiment, the primers are designed to amplify regions of the PDE4D gene associated with an at-risk haplotype for stroke, shown in Tables 4A and 4B. In another embodiment of the invention, a kit for diagnosing susceptibility to stroke can further comprise probes designed to hybridize to regions of the PDE4D gene associated with an at-risk haplotype for stroke, shown in Tables 4A, 4B and Table 7.

[0152] Screening Assays and Agents Identified Thereby

[0153] The invention provides methods (also referred to herein as “screening assays”) for identifying the presence of a nucleotide that hybridizes to a nucleic acid of the invention, as well as for identifying the presence of a polypeptide encoded by a nucleic acid of the invention. In one embodiment, the presence (or absence) of a nucleic acid molecule of interest (e.g., a nucleic acid that has significant homology with a nucleic acid of the invention) in a sample can be assessed by contacting the sample with a nucleic acid comprising a nucleic acid of the invention (e.g., a nucleic acid having the sequence of SEQ ID NO: 1 which may optionally comprise at least one polymorphism shown in Tables 9 and 10, or the complement thereof, or a nucleic acid encoding an amino acid having the sequence of SEQ ID NO: 2, 3, 4, 5, 6, 7, 8, 9, 10, 12 or 14, or a fragment or variant of such nucleic acids), under stringent conditions as described above, and then assessing the sample for the presence (or absence) of hybridization. In a preferred embodiment, high stringency conditions are conditions appropriate for selective hybridization. In another embodiment, a sample containing the nucleic acid molecule of interest is contacted with a nucleic acid containing a contiguous nucleotide sequence (e.g., a primer or a probe as described above) that is at least partially complementary to a part of the nucleic acid molecule of interest (e.g., a PDE4D nucleic acid), and the contacted sample is assessed for the presence or absence of hybridization. In a preferred embodiment, the nucleic acid containing a contiguous nucleotide sequence is completely complementary to a part of the nucleic acid molecule of interest.

[0154] In any of these embodiments, all or a portion of the nucleic acid of interest can be subjected to amplification prior to performing the hybridization.

[0155] In another embodiment, the presence (or absence) of a polypeptide of interest, such as a polypeptide of the invention or a fragment or variant thereof, in a sample can be assessed by contacting the sample with an antibody that specifically hybridizes to the polypeptide of interest (e.g., an antibody such as those described above), and then assessing the sample for the presence (or absence) of binding of the antibody to the polypeptide of interest.

[0156] In another embodiment, the invention provides methods for identifying agents (e.g., fusion proteins, polypeptides, peptidomimetics, prodrugs, receptors, binding agents, antibodies, small molecules or other drugs, or ribozymes) that alter (e.g., increase or decrease) the activity of the polypeptides described herein, or which otherwise interact with the polypeptides herein. For example, such agents can be agents which bind to polypeptides described herein (e.g., PDE4D binding agents); which have a stimulatory or inhibitory effect on, for example, activity of polypeptides of the invention; or which change (e.g., enhance or inhibit) the ability of the polypeptides of the invention to interact with PDE4D binding agents (e.g., receptors or other binding agents); or which alter posttranslational processing of the PDE4D polypeptide (e.g., agents that alter proteolytic processing to direct the polypeptide from where it is normally synthesized to another location in the cell, such as the cell surface); agents that alter proteolytic processing such that more polypeptide is released from the cell, etc.

[0157] In one embodiment, the invention provides assays for screening candidate or test agents that bind to or modulate the activity of polypeptides described herein (or biologically active portion(s) thereof), as well as agents identifiable by the assays. Test agents can be obtained using any of the numerous approaches in combinatorial library methods known in the art, including: biological libraries; spatially addressable parallel solid phase or solution phase libraries; synthetic library methods requiring deconvolution; the ‘one-bead one-compound’ library method; and synthetic library methods using affinity chromatography selection. The biological library approach is limited to polypeptide libraries, while the other four approaches are applicable to polypeptide, non-peptide oligomer or small molecule libraries of compounds (Lam, K. S. (1997) Anticancer Drug Des., 12:145).

[0158] In one embodiment, to identify agents which alter the activity of a PDE4D polypeptide, a cell, cell lysate, or solution containing or expressing a PDE4D polypeptide (e.g., SEQ ID NO: 2, 3, 4, 5, 6, 7, 8, 9, 10, 12 or 14, or another splicing variant encoded by PDE4D), or a fragment or derivative thereof (as described above), can be contacted with an agent to be tested; alternatively, the polypeptide can be contacted directly with the agent to be tested. The level (amount) of PDE4D activity is assessed (e.g., the level (amount) of PDE4D activity is measured, either directly or indirectly), and is compared with the level of activity in a control (i.e., the level of activity of the PDE4D polypeptide or active fragment or derivative thereof in the absence of the agent to be tested). If the level of the activity in the presence of the agent differs, by an amount that is statistically significant, from the level of the activity in the absence of the agent, then the agent is an agent that alters the activity of PDE4D polypeptide. An increase in the level of PDE4D activity relative to level of the control, indicates that the agent is an agent that enhances (is an agonist of) PDE4D activity. Similarly, a decrease in the level of PDE4D activity relative to level of the control, indicates that the agent is an agent that inhibits (is an antagonist of) PDE4D activity. In another embodiment, the level of activity of a PDE4D polypeptide or derivative or fragment thereof in the presence of the agent to be tested, is compared with a control level that has previously been established. A level of the activity in the presence of the agent that differs from the control level by an amount that is statistically significant indicates that the agent alters PDE4D activity.

[0159] The present invention also relates to an assay for identifying agents which alter the expression of the PDE4D gene (e.g., antisense nucleic acids, fusion proteins, polypeptides, peptidomimetics, prodrugs, receptors, binding agents, antibodies, small molecules or other drugs, or ribozymes) which alter (e.g., increase or decrease) expression (e.g., transcription or translation) of the gene or which otherwise interact with the nucleic acids described herein, as well as agents identifiable by the assays. For example, a solution containing a nucleic acid encoding PDE4D polypeptide (e.g., PDE4D gene) can be contacted with an agent to be tested. The solution can comprise, for example, cells containing the nucleic acid or cell lysate containing the nucleic acid; alternatively, the solution can be another solution that comprises elements necessary for transcription/translation of the nucleic acid. Cells not suspended in solution can also be employed, if desired. The level and/or pattern of PDE4D expression (e.g., the level and/or pattern of mRNA or of protein expressed, such as the level and/or pattern of different splicing variants) is assessed, and is compared with the level and/or pattern of expression in a control (i.e., the level and/or pattern of the PDE4D expression in the absence of the agent to be tested). If the level and/or pattern in the presence of the agent differs, by an amount or in a manner that is statistically significant, from the level and/or pattern in the absence of the agent, then the agent is an agent that alters the expression of PDE4D. Enhancement of PDE4D expression indicates that the agent is an agonist of PDE4D activity. Similarly, inhibition of PDE4D expression indicates that the agent is an antagonist of PDE4D activity. In another embodiment, the level and/or pattern of PDE4D polypeptide(s) (e.g., different splicing variants) in the presence of the agent to be tested, is compared with a control level and/or pattern that has previously been established. A level and/or pattern in the presence of the agent that differs from the control level and/or pattern by an amount or in a manner that is statistically significant indicates that the agent alters PDE4D expression. In a preferred embodiment, agents that can alter expression levels of isoforms PDE4D7A and/or PDE4D9 can be assessed, preferably to complement the expression levels to approximate the ratios of a healthy individual.

[0160] In another embodiment of the invention, agents which alter the expression of the PDE4D gene or which otherwise interact with the nucleic acids described herein, can be identified using a cell, cell lysate, or solution containing a nucleic acid encoding the promoter region of the PDE4D gene operably linked to a reporter gene. After contact with an agent to be tested, the level of expression of the reporter gene (e.g. the level of mRNA or of protein expressed) is assessed, and is compared with the level of expression in a control (i.e., the level of the expression of the reporter gene in the absence of the agent to be tested). If the level in the presence of the agent differs, by an amount or in a manner that is statistically significant, from the level in the absence of the agent, then the agent is an agent that alters the expression of PDE4D, as indicated by its ability to alter expression of a gene that is operably linked to the PDE4D gene promoter. Enhancement of the expression of the reporter indicates that the agent is an agonist of PDE4D activity. Similarly, inhibition of the expression of the reporter indicates that the agent is an antagonist of PDE4D activity. In another embodiment, the level of expression of the reporter in the presence of the agent to be tested, is compared with a control level that has previously been established. A level in the presence of the agent that differs from the control level by an amount or in a manner that is statistically significant indicates that the agent alters PDE4D expression.

[0161] Agents which alter the amounts of different splicing variants encoded by PDE4D (e.g., an agent which enhances activity of a first splicing variant, and which inhibits activity of a second splicing variant), as well as agents which are agonists of activity of a first splicing variant and antagonists of activity of a second splicing variant, can easily be identified using these methods described above.

[0162] In other embodiments of the invention, assays can be used to assess the impact of a test agent on the activity of a polypeptide in relation to a PDE4D binding agent. For example, a cell that expresses a compound that interacts with PDE4D (herein referred to as a “PDE4D binding agent”, which can be a polypeptide or other molecule that interacts with PDE4D, such as a receptor) is contacted with PDE4D in the presence of a test agent, and the ability of the test agent to alter the interaction between PDE4D and the PDE4D binding agent is determined. Alternatively, a cell lysate or a solution containing the PDE4D binding agent, can be used. An agent which binds to PDE4D or the PDE4D binding agent can alter the interaction by interfering with, or enhancing the ability of PDE4D to bind to, associate with, or otherwise interact with the PDE4D binding agent. Determining the ability of the test agent to bind to PDE4D or an PDE4D binding agent can be accomplished, for example, by coupling the test agent with a radioisotope or enzymatic label such that binding of the test agent to the polypeptide can be determined by detecting the labeled with 125I, ³⁵S, ¹⁴C or ³H, either directly or indirectly, and the radioisotope detected by direct counting of radioemmission or by scintillation counting. Alternatively, test agents can be enzymatically labeled with, for example, horseradish peroxidase, alkaline phosphatase, or luciferase, and the enzymatic label detected by determination of conversion of an appropriate substrate to product. It is also within the scope of this invention to determine the ability of a test agent to interact with the polypeptide without the labeling of any of the interactants. For example, a microphysiometer can be used to detect the interaction of a test agent with PDE4D or a PDE4D binding agent without the labeling of either the test agent, PDE4D, or the PDE4D binding agent. McConnell, H. M. et al. (1992) Science, 257:1906-1912. As used herein, a “microphysiometer” (e.g., Cytosensor™) is an analytical instrument that measures the rate at which a cell acidifies its environment using a light-addressable potentiometric sensor (LAPS). Changes in this acidification rate can be used as an indicator of the interaction between ligand and polypeptide. See the Examples Section for a discussion of known PDE4D binding partners. Thus, these receptors can be used to screen for compounds that are PDE4D receptor agonists for use in treating stroke or PDE4D receptor antagonists for studying stroke. The linkage data provided herein, for the first time, provides such connection to stroke. Drugs could be designed to regulate PDE4D receptor activation that in turn can be used to regulate signaling pathways and transcription events of genes downstream, such as Cbfa1.

[0163] In another embodiment of the invention, assays can be used to identify polypeptides that interact with one or more PDE4D polypeptides, as described herein. For example, a yeast two-hybrid system such as that described by Fields and Song (Fields, S. and Song, O., Nature 340:245-246 (1989)) can be used to identify polypeptides that interact with one or more PDE4D polypeptides. In such a yeast two-hybrid system, vectors are constructed based on the flexibility of a transcription factor that has two functional domains (a DNA binding domain and a transcription activation domain). If the two domains are separated but fused to two different proteins that interact with one another, transcriptional activation can be achieved, and transcription of specific markers (e.g., nutritional markers such as His and Ade, or color markers such as lacZ) can be used to identify the presence of interaction and transcriptional activation. For example, in the methods of the invention, a first vector is used which includes a nucleic acid encoding a DNA binding domain and also an PDE4D polypeptide, splicing variant, fragment or derivative thereof, and a second vector is used which includes a nucleic acid encoding a transcription activation domain and also a nucleic acid encoding a polypeptide which potentially may interact with the PDE4D polypeptide, splicing variant, or fragment or derivative thereof (e.g., a PDE4D polypeptide binding agent or receptor). Incubation of yeast containing the first vector and the second vector under appropriate conditions (e.g., mating conditions such as used in the Matchmaker™ System from Clontech) allows identification of colonies which express the markers of interest. These colonies can be examined to identify the polypeptide(s) that interact with the PDE4D polypeptide or fragment or derivative thereof. Such polypeptides may be useful as agents that alter the activity of expression of an PDE4D polypeptide, as described above.

[0164] In more than one embodiment of the above assay methods of the present invention, it may be desirable to immobilize either PDE4D, the PDE4D binding agent, or other components of the assay on a solid support, in order to facilitate separation of complexed from uncomplexed forms of one or both of the polypeptides, as well as to accommodate automation of the assay. Binding of a test agent to the polypeptide, or interaction of the polypeptide with a binding agent in the presence and absence of a test agent, can be accomplished in any vessel suitable for containing the reactants. Examples of such vessels include microtitre plates, test tubes, and micro-centrifuge tubes. In one embodiment, a fusion protein (e.g., a glutathione-S-transferase fusion protein) can be provided which adds a domain that allows PDE4D or a PDE4D binding agent to be bound to a matrix or other solid support.

[0165] In another embodiment, modulators of expression of nucleic acid molecules of the invention are identified in a method wherein a cell, cell lysate, or solution containing a nucleic acid encoding PDE4D is contacted with a test agent and the expression of appropriate mRNA or polypeptide (e.g., splicing variant(s)) in the cell, cell lysate, or solution, is determined. The level of expression of appropriate mRNA or polypeptide(s) in the presence of the test agent is compared to the level of expression of mRNA or polypeptide(s) in the absence of the test agent. The test agent can then be identified as a modulator of expression based on this comparison. For example, when expression of mRNA or polypeptide is greater (statistically significantly greater) in the presence of the test agent than in its absence, the test agent is identified as a stimulator or enhancer of the mRNA or polypeptide expression. Alternatively, when expression of the mRNA or polypeptide is less (statistically significantly less) in the presence of the test agent than in its absence, the test agent is identified as an inhibitor of the mRNA or polypeptide expression. The level of mRNA or polypeptide expression in the cells can be determined by methods described herein for detecting mRNA or polypeptide.

[0166] This invention further pertains to novel agents identified by the above-described screening assays. Accordingly, it is within the scope of this invention to further use an agent identified as described herein in an appropriate animal model. For example, an agent identified as described herein (e.g., a test agent that is a modulating agent, an antisense nucleic acid molecule, a specific antibody, or a polypeptide-binding agent) can be used in an animal model to determine the efficacy, toxicity, or side effects of treatment with such an agent. Alternatively, an agent identified as described herein can be used in an animal model to determine the mechanism of action of such an agent. Furthermore, this invention pertains to uses of novel agents identified by the above-described screening assays for treatments as described herein. In addition, an agent identified as described herein can be used to alter activity of a polypeptide encoded by PDE4D, or to alter expression of PDE4D, by contacting the polypeptide or the gene (or contacting a cell comprising the polypeptide or the gene) with the agent identified as described herein.

[0167] Pharmaceutical Compositions

[0168] The present invention also pertains to pharmaceutical compositions comprising agents described herein, particularly nucleotides encoding the polypeptides described herein; comprising polypeptides described herein (e.g., one or more of SEQ ID NO: 2, 3, 4, 5, 6, 7, 8, 9, 10, 12 or 14); and/or comprising other splicing variants encoded by PDE4D; and/or an agent that alters (e.g., enhances or inhibits) PDE4D gene expression or PDE4D polypeptide activity as described herein. For instance, a polypeptide, protein (e.g., an PDE4D receptor), an agent that alters PDE4D gene expression, or a PDE4D binding agent or binding partner, fragment, fusion protein or prodrug thereof, or a nucleotide or nucleic acid construct (vector) comprising a nucleotide of the present invention, or an agent that alters PDE4D polypeptide activity, can be formulated with a physiologically acceptable carrier or excipient to prepare a pharmaceutical composition. The carrier and composition can be sterile. The formulation should suit the mode of administration.

[0169] Suitable pharmaceutically acceptable carriers include but are not limited to water, salt solutions (e.g., NaCl), saline, buffered saline, alcohols, glycerol, ethanol, gum arabic, vegetable oils, benzyl alcohols, polyethylene glycols, gelatin, carbohydrates such as lactose, amylose or starch, dextrose, magnesium stearate, talc, silicic acid, viscous paraffin, perfume oil, fatty acid esters, hydroxymethylcellulose, polyvinyl pyrolidone, etc., as well as combinations thereof. The pharmaceutical preparations can, if desired, be mixed with auxiliary agents, e.g., lubricants, preservatives, stabilizers, wetting agents, emulsifiers, salts for influencing osmotic pressure, buffers, coloring, flavoring and/or aromatic substances and the like which do not deleteriously react with the active agents.

[0170] The composition, if desired, can also contain minor amounts of wetting or emulsifying agents, or pH buffering agents. The composition can be a liquid solution, suspension, emulsion, tablet, pill, capsule, sustained release formulation, or powder. The composition can be formulated as a suppository, with traditional binders and carriers such as triglycerides. Oral formulation can include standard carriers such as pharmaceutical grades of mannitol, lactose, starch, magnesium stearate, polyvinyl pyrolidone, sodium saccharine, cellulose, magnesium carbonate, etc.

[0171] Methods of introduction of these compositions include, but are not limited to, intradermal, intramuscular, intraperitoneal, intraocular, intravenous, subcutaneous, topical, oral and intranasal. Other suitable methods of introduction can also include gene therapy (as described below), rechargeable or biodegradable devices, particle acceleration devises (“gene guns”) and slow release polymeric devices. The pharmaceutical compositions of this invention can also be administered as part of a combinatorial therapy with other agents.

[0172] The composition can be formulated in accordance with the routine procedures as a pharmaceutical composition adapted for administration to human beings. For example, compositions for intravenous administration typically are solutions in sterile isotonic aqueous buffer. Where necessary, the composition may also include a solubilizing agent and a local anesthetic to ease pain at the site of the injection. Generally, the ingredients are supplied either separately or mixed together in unit dosage form, for example, as a dry lyophilized powder or water free concentrate in a hermetically sealed container such as an ampule or sachette indicating the quantity of active agent. Where the composition is to be administered by infusion, it can be dispensed with an infusion bottle containing sterile pharmaceutical grade water, saline or dextrose/water. Where the composition is administered by injection, an ampule of sterile water for injection or saline can be provided so that the ingredients may be mixed prior to administration.

[0173] For topical application, nonsprayable forms, viscous to semi-solid or solid forms comprising a carrier compatible with topical application and having a dynamic viscosity preferably greater than water, can be employed. Suitable formulations include but are not limited to solutions, suspensions, emulsions, creams, ointments, powders, enemas, lotions, sols, liniments, salves, aerosols, etc., which are, if desired, sterilized or mixed with auxiliary agents, e.g., preservatives, stabilizers, wetting agents, buffers or salts for influencing osmotic pressure, etc. The agent may be incorporated into a cosmetic formulation. For topical application, also suitable are sprayable aerosol preparations wherein the active ingredient, preferably in combination with a solid or liquid inert carrier material, is packaged in a squeeze bottle or in admixture with a pressurized volatile, normally gaseous propellant, e.g., pressurized air.

[0174] Agents described herein can be formulated as neutral or salt forms. Pharmaceutically acceptable salts include those formed with free amino groups such as those derived from hydrochloric, phosphoric, acetic, oxalic, tartaric acids, etc., and those formed with free carboxyl groups such as those derived from sodium, potassium, ammonium, calcium, ferric hydroxides, isopropylamine, triethylamine, 2-ethylamino ethanol, histidine, procaine, etc.

[0175] The agents are administered in a therapeutically effective amount. The amount of agents which will be therapeutically effective in the treatment of a particular disorder or condition will depend on the nature of the disorder or condition, and can be determined by standard clinical techniques. In addition, in vitro or in vivo assays may optionally be employed to help identify optimal dosage ranges. The precise dose to be employed in the formulation will also depend on the route of administration, and the seriousness of the symptoms of stroke, and should be decided according to the judgment of a practitioner and each patient's circumstances. Effective doses may be extrapolated from dose-response curves derived from in vitro or animal model test systems.

[0176] The invention also provides a pharmaceutical pack or kit comprising one or more containers filled with one or more of the ingredients of the pharmaceutical compositions of the invention. Optionally associated with such container(s) can be a notice in the form prescribed by a governmental agency regulating the manufacture, use or sale of pharmaceuticals or biological products, which notice reflects approval by the agency of manufacture, use of sale for human administration. The pack or kit can be labeled with information regarding mode of administration, sequence of drug administration (e.g., separately, sequentially or concurrently), or the like. The pack or kit may also include means for reminding the patient to take the therapy. The pack or kit can be a single unit dosage of the combination therapy or it can be a plurality of unit dosages. In particular, the agents can be separated, mixed together in any combination, present in a single vial or tablet. Agents assembled in a blister pack or other dispensing means is preferred. For the purpose of this invention, unit dosage is intended to mean a dosage that is dependent on the individual pharmacodynamics of each agent and administered in FDA approved dosages in standard time courses.

[0177] Methods of Therapy

[0178] The present invention encompasses methods of treatment (prophylactic and/or therapeutic) for stroke or a susceptibility to stroke, such as individuals in the target populations described herein particularly ischemic (e.g., carotid and cardiogenic strokes) and TIA, using a PDE4D therapeutic agent. A “PDE4D therapeutic agent” is an agent that alters (e.g., enhances or inhibits) PDE4D polypeptide (enzymatic activity) and/or PDE4D gene expression, as described herein (e.g., a PDE4D agonist or antagonist). PDE4D therapeutic agents can alter PDE4D polypeptide activity or nucleic acid expression by a variety of means, such as, for example, by providing additional PDE4D polypeptide or by upregulating the transcription or translation of the PDE4D gene; by altering posttranslational processing of the PDE4D polypeptide; by altering transcription of PDE4D splicing variants; or by interfering with PDE4D polypeptide activity (e.g., by binding to a PDE4D polypeptide), or by downregulating the transcription or translation of the PDE4D gene.

[0179] In particular, the invention relates to methods of treatment for stroke or susceptibility to stroke (for example, for individuals in an at-risk population such as those described herein); as well as to methods of treatment for myocardial infarction, atherosclerosis, acute coronary syndrome (e.g., unstable angina, non-ST-elevation myocardial infarction (NSTEMI) or ST-elevation myocardial infarction (STEMI)); for decreasing risk of a second myocardial infarction; for atherosclerosis, such as for patients requiring treatment (e.g., angioplasty, stents, coronary artery bypass graft) to restore blood flow in arteries (e.g., coronary arteries) and peripheral arterial occlusive disease.

[0180] Representative PDE4D therapeutic agents include the following:

[0181] nucleic acids or fragments or derivatives thereof described herein, particularly nucleotides encoding the polypeptides described herein and vectors comprising such nucleic acids (e.g., a gene, cDNA, and/or mRNA, double-stranded interfering RNA, a nucleic acid encoding a PDE4D polypeptide or active fragment or derivative thereof, or an oligonucleotide; for example, SEQ ID NO: 1 which may optionally comprise at least one polymorphism shown in Tables 9 and 10 or a nucleic acid encoding SEQ ID NO: 2, 3, 4, 5, 6, 7, 8, 9, 10, 12 or 14, or fragments or derivatives thereof), antisense nucleic acids or small double-stranded interfering RNA;

[0182] polypeptides described herein (e.g., one or more of SEQ ID NO: 2, 3, 4, 5, 6, 7, 8, 9, 10, 12 or 14, and/or other splicing variants encoded by PDE4D, or fragments or derivatives thereof);

[0183] other polypeptides (e.g., PDE4D receptors); PDE4D binding agents; peptidomimetics; fusion proteins or prodrugs thereof, antibodies (e.g., an antibody to a mutant PDE4D polypeptide, or an antibody to a non-mutant PDE4D polypeptide, or an antibody to a particular splicing variant encoded by PDE4D, as described above); ribozymes; other small molecules;

[0184] and other agents that alter (e.g., inhibit or antagonize) PDE4D gene expression or polypeptide activity, or that regulate transcription of PDE4D splicing variants (e.g., agents that affect which splicing variants are expressed, or that affect the amount of each splicing variant that is expressed).

[0185] More than one PDE4D therapeutic agent can be used concurrently, if desired.

[0186] The PDE4D therapeutic agent that is a nucleic acid is used in the treatment of stroke. The term, “treatment” as used herein, refers not only to ameliorating symptoms associated with the disease, but also preventing or delaying the onset of the disease, and also lessening the severity or frequency of symptoms of the disease, preventing or delaying the occurrence of a second episode of the disease or condition; and/or also lessening the severity or frequency of symptoms of the disease or condition. In the case of atherosclerosis, “treatment” also refers to a minimization or reversal of the development of plaques. The therapy is designed to alter (e.g., inhibit or enhance), replace or supplement activity of a PDE4D polypeptide in an individual. For example, a PDE4D therapeutic agent can be administered in order to upregulate or increase the expression or availability of the PDE4D gene or of specific splicing variants of PDE4D, or, conversely, to downregulate or decrease the expression or availability of the PDE4D gene or specific splicing variants of PDE4D. Upregulation or increasing expression or availability of a native PDE4D gene or of a particular splicing variant could interfere with or compensate for the expression or activity of a defective gene or another splicing variant; downregulation or decreasing expression or availability of a native PDE4D gene or of a particular splicing variant could minimize the expression or activity of a defective gene or the particular splicing variant and thereby minimize the impact of the defective gene or the particular splicing variant.

[0187] The PDE4D therapeutic agent(s) are administered in a therapeutically effective amount (i.e., an amount that is sufficient to treat the disease, such as by ameliorating symptoms associated with the disease, preventing or delaying the onset of the disease, and/or also lessening the severity or frequency of symptoms of the disease). The amount which will be therapeutically effective in the treatment of a particular individual's disorder or condition will depend on the symptoms and severity of the disease, and can be determined by standard clinical techniques. In addition, in vitro or in vivo assays may optionally be employed to help identify optimal dosage ranges. The precise dose to be employed in the formulation will also depend on the route of administration, and the seriousness of the disease or disorder, and should be decided according to the judgment of a practitioner and each patient's circumstances. Effective doses may be extrapolated from dose-response curves derived from in vitro or animal model test systems.

[0188] In one embodiment, a nucleic acid of the invention (e.g., a nucleic acid encoding a PDE4D polypeptide, such as SEQ ID NO: 1 which may optionally comprise at least one polymorphism shown in Tables 9 and 10; or another nucleic acid that encodes a PDE4D polypeptide or a splicing variant, derivative or fragment thereof, such as a nucleic acid encoding SEQ ID NO: 2, 3, 4, 5, 6, 7, 8, 9, 10, 12 or 14) can be used, either alone or in a pharmaceutical composition as described above. For example, PDE4D or a cDNA encoding the PDE4D polypeptide, either by itself or included within a vector, can be introduced into cells (either in vitro or in vivo) such that the cells produce native PDE4D polypeptide. If necessary, cells that have been transformed with the gene or cDNA or a vector comprising the gene or cDNA can be introduced (or re-introduced) into an individual affected with the disease. Thus, cells which, in nature, lack native PDE4D expression and activity, or have mutant PDE4D expression and activity, or have expression of a disease-associated PDE4D splicing variant, can be engineered to express PDE4D polypeptide or an active fragment of the PDE4D polypeptide (or a different variant of PDE4D polypeptide). In a preferred embodiment, nucleic acid encoding the PDE4D polypeptide, or an active fragment or derivative thereof, can be introduced into an expression vector, such as a viral vector, and the vector can be introduced into appropriate cells in an animal. Other gene transfer systems, including viral and nonviral transfer systems, can be used. Alternatively, nonviral gene transfer methods, such as calcium phosphate coprecipitation, mechanical techniques (e.g., microinjection); membrane fusion-mediated transfer via liposomes; or direct DNA uptake, can also be used.

[0189] Alternatively, in another embodiment of the invention, a nucleic acid of the invention; a nucleic acid complementary to a nucleic acid of the invention; or a portion of such a nucleic acid (e.g., an oligonucleotide as described below), can be used in “antisense” therapy, in which a nucleic acid (e.g., an oligonucleotide) which specifically hybridizes to the mRNA and/or genomic DNA of PDE4D is administered or generated in situ. The antisense nucleic acid that specifically hybridizes to the mRNA and/or DNA inhibits expression of the PDE4D polypeptide, e.g., by inhibiting translation and/or transcription. Binding of the antisense nucleic acid can be by conventional base pair complementarity, or, for example, in the case of binding to DNA duplexes, through specific interaction in the major groove of the double helix.

[0190] An antisense construct of the present invention can be delivered, for example, as an expression plasmid as described above. When the plasmid is transcribed in the cell, it produces RNA which is complementary to a portion of the mRNA and/or DNA which encodes PDE4D polypeptide. Alternatively, the antisense construct can be an oligonucleotide probe which is generated ex vivo and introduced into cells; it then inhibits expression by hybridizing with the mRNA and/or genomic DNA of PDE4D. In one embodiment, the oligonucleotide probes are modified oligonucleotides which are resistant to endogenous nucleases, e.g., exonucleases and/or endonucleases, thereby rendering them stable in vivo. Exemplary nucleic acid molecules for use as antisense oligonucleotides are phosphoramidate, phosphothioate and methylphosphonate analogs of DNA (see also U.S. Pat. Nos. 5,176,996; 5,264,564; and 5,256,775). Additionally, general approaches to constructing oligomers useful in antisense therapy are also described, for example, by Van der Krol et al. ((1988) Biotechniques 6:958-976); and Stein et al. ((1988) Cancer Res 48:2659-2668). With respect to antisense DNA, oligodeoxyribonucleotides derived from the translation initiation site, e.g., between the −10 and +10 regions of PDE4D sequence, are preferred.

[0191] To perform antisense therapy, oligonucleotides (mRNA, cDNA or DNA) are designed that are complementary to mRNA encoding PDE4D. The antisense oligonucleotides bind to PDE4D mRNA transcripts and prevent translation. Absolute complementarity, although preferred, is not required. a sequence “complementary” to a portion of an RNA, as referred to herein, indicates that a sequence has sufficient complementarity to be able to hybridize with the RNA, forming a stable duplex; in the case of double-stranded antisense nucleic acids, a single strand of the duplex DNA may thus be tested, or triplex formation may be assayed. The ability to hybridize will depend on both the degree of complementarity and the length of the antisense nucleic acid, as described in detail above. Generally, the longer the hybridizing nucleic acid, the more base mismatches with an RNA it may contain and still form a stable duplex (or triplex, as the case may be). One skilled in the art can ascertain a tolerable degree of mismatch by use of standard procedures.

[0192] The oligonucleotides used in antisense therapy can be DNA, RNA, or chimeric mixtures or derivatives or modified versions thereof, single-stranded or double-stranded. The oligonucleotides can be modified at the base moiety, sugar moiety, or phosphate backbone, for example, to improve stability of the molecule, hybridization, etc. The oligonucleotides can include other appended groups such as peptides (e.g., for targeting host cell receptors in vivo), or agents facilitating transport across the cell membrane (see, e.g., Letsinger et al. (1989) Proc. Natl. Acad. Sci. USA 86:6553-6556; Lemaitre et al., (1987), Proc. Natl. Acad. Sci. USA 84:648-652; PCT International Publication No. WO88/09810) or the blood-brain barrier (see, e.g., PCT International Publication No. WO89/10134), or hybridization-triggered cleavage agents (see, e.g., Krol et al. (1988) BioTechniques 6:958-976) or intercalating agents. (See, e.g., Zon, (1988), Pharm. Res. 5:539-549). To this end, the oligonucleotide may be conjugated to another molecule (e.g., a peptide, hybridization triggered cross-linking agent, transport agent, hybridization-triggered cleavage agent).

[0193] The antisense molecules are delivered to cells that express PDE4D in vivo. A number of methods can be used for delivering antisense DNA or RNA to cells; e.g., antisense molecules can be injected directly into the tissue site, or modified antisense molecules, designed to target the desired cells (e.g., antisense linked to peptides or antibodies that specifically bind receptors or antigens expressed on the target cell surface) can be administered systematically. Alternatively, in a preferred embodiment, a recombinant DNA construct is utilized in which the antisense oligonucleotide is placed under the control of a strong promoter (e.g., pol III or pol II). The use of such a construct to transfect target cells in the patient results in the transcription of sufficient amounts of single stranded RNAs that will form complementary base pairs with the endogenous PDE4D transcripts and thereby prevent translation of the PDE4D mRNA. For example, a vector can be introduced in vivo such that it is taken up by a cell and directs the transcription of an antisense RNA. Such a vector can remain episomal or become chromosomally integrated, as long as it can be transcribed to produce the desired antisense RNA. Such vectors can be constructed by recombinant DNA technology methods standard in the art and described above. For example, a plasmid, cosmid, YAC or viral vector can be used to prepare the recombinant DNA construct that can be introduced directly into the tissue site. Alternatively, viral vectors can be used which selectively infect the desired tissue, in which case administration may be accomplished by another route (e.g., systemically).

[0194] Endogenous PDE4D expression can be also reduced by inactivating or “knocking out” PDE4D or its promoter using targeted homologous recombination (e.g., see Smithies et al. (1985) Nature 317:230-234; Thomas & Capecchi (1987) Cell 51:503-512; Thompson et al. (1989) Cell 5:313-321). For example, a mutant, non-functional PDE4D (or a completely unrelated DNA sequence) flanked by DNA homologous to the endogenous PDE4D (either the coding regions or regulatory regions of PDE4D) can be used, with or without a selectable marker and/or a negative selectable marker, to transfect cells that express PDE4D in vivo. Insertion of the DNA construct, via targeted homologous recombination, results in inactivation of PDE4D. The recombinant DNA constructs can be directly administered or targeted to the required site in vivo using appropriate vectors, as described above. Alternatively, expression of non-mutant PDE4D can be increased using a similar method: targeted homologous recombination can be used to insert a DNA construct comprising a non-mutant, functional PDE4D (e.g., a gene having SEQ ID NO: 1 which may optionally comprise at least one polymorphism shown in Tables 9 and 10), or a portion thereof, in place of a mutant PDE4D in the cell, as described above. In another embodiment, targeted homologous recombination can be used to insert a DNA construct comprising a nucleic acid that encodes a PDE4D polypeptide variant that differs from that present in the cell.

[0195] Alternatively, endogenous PDE4D expression can be reduced by targeting deoxyribonucleotide sequences complementary to the regulatory region of PDE4D (i.e., the PDE4D promoter and/or enhancers) to form triple helical structures that prevent transcription of PDE4D in target cells in the body. (See generally, Helene, C. (1991) Anticancer Drug Des., 6(6):569-84; Helene, C., et al. (1992) Ann, N. Y Acad. Sci., 660:27-36; and Maher, L. J. (1992) Bioassays 14(12):807-15). Likewise, the antisense constructs described herein, by antagonizing the normal biological activity of one of the PDE4D proteins, can be used in the manipulation of tissue, e.g., tissue differentiation, both in vivo and for ex vivo tissue cultures. Furthermore, the anti-sense techniques (e.g., microinjection of antisense molecules, or transfection with plasmids whose transcripts are anti-sense with regard to a PDE4D mRNA or gene sequence) can be used to investigate role of PDE4D in developmental events, as well as the normal cellular function of PDE4D in adult tissue. Such techniques can be utilized in cell culture, but can also be used in the creation of transgenic animals.

[0196] In yet another embodiment of the invention, other PDE4D therapeutic agents as described herein can also be used in the treatment or prevention of stroke. The therapeutic agents can be delivered in a composition, as described above, or by themselves. They can be administered systemically, or can be targeted to a particular tissue. The therapeutic agents can be produced by a variety of means, including chemical synthesis; recombinant production; in vivo production (e.g., a transgenic animal, such as U.S. Pat. No. 4,873,316 to Meade et al.), for example, and can be isolated using standard means such as those described herein.

[0197] A combination of any of the above methods of treatment (e.g., administration of non-mutant PDE4D polypeptide in conjunction with antisense therapy targeting mutant PDE4D mRNA; administration of a first splicing variant encoded by PDE4D in conjunction with antisense therapy targeting a second splicing encoded by PDE4D), can also be used.

[0198] The invention will be further described by the following non-limiting examples. The teachings of all publications cited herein are incorporated herein by reference in their entirety.

### EXAMPLES

### Example 1

### PDE4D Variations and Haplotypes Increase Risk for Stroke

[0199] Icelandic Stroke Patients and Phenotype Characterization

[0200] A population-based list containing 2543 Icelandic stroke patients, diagnosed from 1993 through 1997, was derived from two major hospitals in Iceland and the Icelandic Heart Association (the study was approved by the Icelandic Data Protection Commission of Iceland and the National Bioethics Committee). Patients with hemorrhagic stroke represented 6% of all patients (patients with the Icelandic type of hereditary cerebral hemorrhage with amyloidosis and patients with subarachnoid hemorrhage were excluded). Ischemic stroke accounted for 67% of the total patients and TIAs 27%. The distribution of stroke suptypes in this study is similar to that reported in other Caucasian populations (Mohr, J. P., et al., Neurology, 28:754-762 (1978); L. R. Caplan, In Stroke, A Clinical Approach (Butterworth-Heinemann, Stoneham, Mass., ed 3, (1993)).

[0201] The list of approximately 2000 living patients was run through our computerized genealogy database. A comprehensive genealogy database that has been established at deCODE genetics was used to cluster the patients in pedigrees. Each version of the computerized genealogy database was reversibly encrypted by the Data Protection Commission of Iceland before arriving at the laboratory (Gulcher, J. R., et al., Eur. J. Hum. Genet. 8:739 (2000)). The database uses a patient list, with encrypted personal identifiers, as input, and recursive algorithms to find all ancestors in the database who are related to any member on the input list within a given number of generations back (Gulcher, J. R., and Stefansson, K., Clin. Chem. Lab. Med. 36:523 (1998)) covering the whole Icelandic nation. The cluster function then searches for ancestors who are common to any two or more members of the input list. One hundred and seventy-nine families with two or more living patients were chosen for the study with a total of 476 patients connected within 6 meioses (6 meioses connect second cousins). Informed consent was obtained from all patients and their relatives whose DNA samples were used in the linkage scan. The mean separation between affected pairs is 4.8 meioses. Of the patients selected for the study 73% had ischemic strokes, 23% TIAs and 4% hemorrhagic strokes.

[0202] In the selected families, hemorrhagic stroke patients clustered with ischemic stroke and TIA patients, and there were no families with a striking preponderance of hemorrhagic stroke or of the subtypes of ischemic stroke. Patients with ischemic stroke were reclassified according to the TOAST (Trial of Org 10172 in Acute Stroke Treatment) sub-classification system for stroke (Adams, H. P., Jr., et al., Stroke, 24:34-41 (1993)). This system includes five categories: (1) large-artery atherosclerosis, (2) cardioembolism, (3) small-artery occlusion (lacune), (4) stroke of other determined etiology and (5) stroke of undetermined etiology. The diagnoses were based on clinical features and on data from ancillary diagnostic studies. Patients defined with large-artery atherosclerosis had clinical and brain imaging findings of cerebral cortical dysfunction and either significant (>70%) stenosis (this is a stricter criteria than used in TOAST where 50% stenosis is the cut-off) or occlusion of a major brain artery or branch cortical artery. Potential sources of cardiogenic embolism were excluded. The category cardioembolism included patients with at least one cardiac source for an embolus and potential large-artery sources of thromobosis and embolism was eliminated. Patients with small-artery occlusion had one of the traditional clinical lacunar syndromes and no evidence of cerebral cortical dysfunction. Potential cardiac source of embolus and stenosis >70% in an ipsilateral extracranial artery was excluded. The category, acute stroke of other determined etiology, included patients with rare causes of stroke and patients with two or more potential causes of stroke. If the causes of stroke could not be determined despite extensive evaluation patients were included in the category stroke of undetermined etiology. FIG. 1 displays two pedigrees each affected by several of the stroke subtypes, including hemorrhagic stroke. Apparently what is inherited in stroke is the broadly defined phenotype.

[0203] Genome-Wide Scan

[0204] A genome-wide scan was performed using a framework map of about 1000 microsatellite markers. The DNA samples were genotyped using approximately 1000 fluorescently labelled primers. A microsatellite screening set based in part on the ABI Linkage Marker (v2) screening set and the ABI Linkage Marker (v2) intercalating set in combination with 500 custom-made markers were developed. All markers were extensively tested for robustness, ease of scoring, and efficiency in 4×multiplex PCR reactions. In the framework marker set, the average spacing between markers was approximately 4 cM with no gaps larger than 10 cM. Marker positions were obtained from the Marshfield map, except for a three-marker putative inversion on chromosome 8 (Jonsdottir, G. M., et al., Am. J. Hum. Genet., 67 (Suppl. 2):332 (2000); Yu, A., et al., Am. J. Hum. Genet. 67 (Suppl. 2):10 (2000). The PCR amplifications were set up, run and pooled on Perkin Elmer/Applied Biosystems 877 Integrated Catalyst Thermocyclers with a similar protocol for each marker. The reaction volume used was 5 μl and for each PCR reaction 20 ng of genomic DNA was amplified in the presence of 2 pmol of each primer, 0.25 U AMPLITAQ GOLD (DNA polymerase; trademark of Roche Molecular Systems), 0.2 mM dNTPs and 2.5 mM MgCl2 (buffer was supplied by manufacturer). The PCR conditions used were 95° C. for 10 minutes, then 37 cycles of 15 s at 94° C., 30 s at 55° C. and 1 min at 72° C. The PCR products were supplemented with the internal size standard and the pools were separated and detected on Applied Biosystems model 377 Sequencer using v3.0 GENESCAN (peak calling software; trademark of Applied Biosystems). Alleles were called automatically with the TRUEALLELE (computer program for alleles identification; trademark of Cybergenetics, Inc.) program, and the program, DECODE-GT (computer editing program that works downstream of the TRUEALLELE program; trademark of deCODE genetics), was used to fractionate according to quality and edit the called genotypes (Palsson, B., et al., Genome Res. 9:1002 (1999)). At least 180 Icelandic controls were genotyped to derive allelic frequencies.

[0205] A total of 476 patients and 438 relatives were genotyped. The data was analyzed and the statistical significance determined by applying affecteds-only allele-sharing methods (which does not specify any particular inheritance model) implemented in the ALLEGRO (computer program for multipoint linkage analysis; trademark of deCODE genetics) program that calculates lod scores based on multipoint calculations. Our baseline linkage analysis uses the Sₚₐᵢᵣₛ scoring function (Kruglyak, L., et al., Am. J. Hum. Genet., 58:1347 (1996)), the exponential allele-sharing model (Kong, A. and Cox, N.J., Am. J. Hum. Genet., 61:1179 (1997)), and a family weighting scheme which is halfway, on the log scale, between weighting each affected pair equally and weighting each family equally. In the analysis we treat all genotyped individuals who are not affected as “unknown”. All linkage analyses in this paper were performed using multipoint calculation with the program ALLEGRO (deCODE genetics) (Gudbjartsson, D. F., et al., Nat. Genet. 25:12 (2000)).

[0206] The allele sharing lod scores for the genome scan using the framework map showed three regions that achieved a lod score above 1.0. Two of these regions are on chromosome 5q. The first peak is at approximately 69 cM with a lod score of 2.00. The second peak is at 99 cM with a lod score of 1.14. The third region is on chromosome 14q at 55 cM with a lod score of 1.24.

[0207] The information for linkage at the 5q locus was increased by genotyping an additional 45 markers over a 45 cM segment which spanned both peaks. The information used here is defined by Nicolae (D. L. Nicolae, Thesis, University of Chicago (1999)) and has been demonstrated to be asymptotically equivalent to a classical measure of the fraction of missing information (Dempster, A. P., et al., J. R. Statist. Soc. B, 39:1 (1977)). While the lod score at the second peak dropped slightly to around 1.05, the lod score at the first peak increased to 3.39. However, close inspection of our results suggested that not only does the Marshfield genetic map lack resolution (many markers assigned the same map location), but also there may be some errors in their order. As a result, the genetic length of the region estimated using our material was substantially greater than what is reported. By modifying the ALLEGRO (deCODE genetics) program, we applied the EM algorithm to our data to estimate the genetic distances between markers. We found that our estimate of the genetic length of the region was substantially longer than that given in the Marshfield map. This indicates a problem with marker order because, in general, incorrect marker order leads to an increased number of apparent crossovers and increases the apparent genetic length.

[0208] Physical and Genetic Mapping

[0209] The marker order and inter-marker distances were improved by constructing high density physical and genetic maps over a 20 cM region between markers D5S474 and D5S2046. A combination of data from coincident hybridizations of BAC membranes using a high density of STSs and the Fingerprinting Contig database was used to build large contigs of BACs from the RPCI-11 library. The order of the linkage markers was also confirmed by high-resolution genetic mapping using the stroke families supplemented with over 112 other large nuclear families. High resolution genetic mapping was used both to anchor and place in order contigs found by physical mapping as well as to obtain accurate inter-marker distances for the correctly ordered markers. Data from 112 Icelandic nuclear families (sibships with their parents, containing from two to seven siblings) were analyzed together with the nuclear families available within the stroke pedigrees. For the purpose of genetic mapping the 112 nuclear families alone provide 588 meioses, and the total number of meioses available for mapping was over 2000. By comparison, the Marshfield genetic map was constructed based on 182 meioses. The large number of meiotic events within our families provides the ability to map markers to the resolution of 0.5 to 1.0 cM. Combining this information with the physical map resulted in a highly reliable order of markers and inter-marker distances within this 20 cM region. Linkage markers common to the genetic and physical maps were used to anchor and place in order four of the physically mapped contigs. By integrating the genetic and physical maps a most likely order of 30 polymorphic markers was derived.

[0210] BAC contigs were generated by a method that combines coincident primer hybridization with data mining. The RPCI-11 human male BAC library segments 1 & 2 (Pieter de Jong, Children's Hospital Oakland Research Institute) containing about 200,000 clones with a 12× coverage, were gridded using a 6×6 double offset pattern in 23 cm×23 cm membranes with a BioGrid robot (Biorobotics Ltd., Cambridge, UK). Initially, hybridizations were performed with markers in the region of interest according to their location in the Weizmann Institute Unified Database. Primer sequences were analyzed and discarded according to their content of known repeats, E. Coli and vector sequences (the analysis was performed using software developed at deCODE genetics). One hundred and fifty markers in the region (30 polymorphic markers used in linkage and 120 generated from STSs) separated by an average of 130 kb were used. The selected markers were used to generate two ³²P labelled probes, F that contained the pooled forward primers and R that contained the pooled reverse primers. Reading of positive signals was performed automatically from digitized images of resulting autoradiograms by informatics tools developed at deCODE genetics. The coincident signals in both hybridizations were selected as positive clones. A set of overlapping clones was assembled through a combination of hybridization and BAC fingerprint walking. Fingerprints of positive clones were analyzed using the FPC database developed at the Sanger Center. Data from FPC contigs prebuilt with a cutoff of 3e-12 and from sequence datamining was integrated with the hybridization results. BACs in the region detected by data mining and hybridization were re-arrayed using a Multiprobe Ilex robot (Packard, Meriden, Conn.). Small membranes (8 cm×12 cm) were gridded in 6×6 double offset pattern and individually hybridized with the markers of interest. Positive patterns were transferred using transparencies to an Excel file containing macros to provide BAC to marker associations. A visual map was generated by combining the hybridization, fingerprinting and sequence data. New markers were generated from BAC end sequences to close the gap. After several rounds of hybridization positive BACs were assembled into 7 contigs covering approximately 20 Mb. Thirty of the polymorphic markers used in linkage were assigned to four of the contigs. Estimation of contig lengths and distance between markers assigned to them was based on the FPC program.

[0211] Twenty-seven of our 30 linkage markers mapped to three contigs in the October 2000 release from UCSC, the UC Santa Cruz (UCSC) draft assembly. The marker order within the contigs is in agreement with our order with the exception of two markers. Although the UCSC assemblies are improving, some contigs have incorrect order, orientation, or contig assembly. We believe that high resolution genetic mapping and perhaps focused hybridization experiments are still necessary to confirm accuracy of sequence assemblies. In addition, high resolution genetic mapping provides better estimates of inter-marker genetic distances that are also important for linkage analysis (Halpern, J. and Whittermore, A. S., Hum. Hered. 49:194 (1999); Daw, E. W., et al., Genet. Epidemiol. 19:366 (2000)).

[0212] Statistical Methods for Linkage Analysis

[0213] Multipoint, affected-only allele-sharing methods were used in the analyses to assess evidence for linkage. All results, both the LOD-score and the non-parametric linkage (NPL) score, were obtained using the program Allegro (Gudbjartsson et al., Nat. Genet. 25:12-3, 2000). Our baseline linkage analysis, as previously described (Gretarsdottir et al., Am J Hom Genet, 70:593-603, 2002), uses the Sₚₐᵢᵣₛ scoring function (Whittemore, A. S., Halpern, J. (1994), Biometrics 50:118-27; Kruglyak L, et al. (1996), Am J Hum Genet 58:1347-63), the exponential allele-sharing model (Kong, A. and Cox, N.J. (1997), Am J Hum Genet 61:1179-88) and a family weighting scheme that is halfway, on the log-scale, between weighting each affected pair equally and weighting each family equally. The information measure we use is part of the Allegro program output and the information value equals zero if the marker genotypes are completely uninformative and equals one if the genotypes determine the exact amount of allele sharing by decent among the affected relatives (Gretarsdottir et al., Am. J. Hom. Genet, 70:593-603, 2002). We computed the P-values two different ways and here report the less significant result. The first P-value was computed on the basis of large sample theory; the distribution of Zᵢᵣ=√(2[logₑ(10)LOD]) approximates a standard normal variable under the null hypothesis of no linkage (Kong, A. and Cox, N.J. (1997), Am J Hum Genet 61:1179-88). The second P-value was calculated by comparing the observed LOD-score with its complete data sampling distribution under the null hypothesis (Gudbjartsson et al., Nat. Genet. 25:12-3, 2000). When the data consist of more than a few families, as is the case here, these two P-values tend to be very similar.

[0214] Final Linkage Results and Localization

[0215] Linkage analysis including genotypes from the higher density markers using the deCODE marker order resulted in a lod score of 4.40 (P=3.9×10⁻⁶) on chromosome 5q12 at the marker D5S2080. The reported P value is part of the output of the ALLEGRO (deCODE genetics) program which was developed at deCODE and has become a standard linkage program worldwide over the last 3 years (Gudbjartsson et al., Nat. Genet. 25:12-3, 2000). We have given it to over 200 academic departments around the world free of charge and it is widely used. The locus has been designated as STRK1. With the addition of these extra markers, it was possible to narrow down the region to a segment less than 6 cM, from D5S1474 to D5S398, as defined by one drop in lod.

[0216] To further investigate the contribution of this susceptibility locus to stroke, a range of parametric models were fitted to the data. However, all analyses were still affecteds only in the sense that individuals were either classified as affecteds or having unknown disease status. A lod score of 4.08 was obtained with a dominant model where the allele frequency of the susceptibility gene was assumed to be 5% and carriers of the alteration were assumed to have seven-fold the risk of a non-carrier. By inspecting the individual families, no obvious correlation was seen between families that contribute positively to the linkage results with the prevalence of hypertension, diabetes or hyperlipidemias. When the data were reanalyzed with the hemorrhagic stroke patients removed, the allele sharing lod score increased to 4.86 at D5S2080. Although this 0.46 increase in log score suggests that STRK1 is involved primarily in ischemic stroke and TIAs, it is not statistically significant based on simulations (one sided P equals 0.09). In order to assess whether such a change in lod score would be likely to occur by chance we selected 1000 random sets of 22 patients whose status we then changed to “unknown” in an analysis. The P value we present is the fraction of the 1000 simulations which produce a lod score increase at the peak locus equal to or greater than that which we observed by changing the affection status of the 22 hemorrhagic stroke patients to “unknown”.

[0217] Identification of Allelic Association

[0218] All microsatellite markers in the approx. 6 cM interval (markers from D5S398 to D5S1474) were analyzed with respect to allelic association.

[0219] Identification of Microsatellite and SNP Haplotypes Within the Gene

[0220] A total number of 804 Icelandic patients were analyzed for microsatellite single marker and multimarker (haplotype) association. The number of controls used in the analysis was 504. Each patient had 2 or more close relatives genotyped in order to derive haplotypes. The haplotypes were derived using ALLEGRO and used in a case-control analysis looking for markers and haplotypes over-represented in patients compared to controls (results shown in Table 1). In summary, we found several markers and haplotypes with statistically significant association to stroke; that is, the alleles and haplotypes were more frequent in patients than in controls. This showed that the PDE4D is associated to stroke.

[0221] We then repeated the association analysis separately for patients (860 unrelated Icelandic stroke patients and 908 Icelandic controls) with each of the four stroke sub-phenotypes defined according to the TOAST research criteria: carotid, cardiogenic, small vessel occlusive and hemorrhagic stroke. Both carotid stroke and cardiogenic stroke showed even stronger association to microsatellite marker, AC008818-1, than did the entire group of all stroke patients. The relative risk of the at-risk allele was 1.6 for the combined set (assuming a multiplicative model) and the corresponding population attributed risk (PAR) was 0.25 with unadjusted p-value of 1.57×10⁻⁶ and adjusted p-value of 0.0001 (Table 2A). The marker AC008818-1 is positioned approximately 5000 bp upstream of the first PDE4D7 isoform specific exon (see Example 2). This work showed that PDE4D is more significantly associated with the two major and most common subforms of stroke—carotid stroke and cardiogenic stroke. Of interest, these forms are most directly related to atherosclerosis. This marker does not show significant association to small vessel occlusive disease that is a form of stroke which is less related to atherosclerosis.

TABLE 1
Icelandic Patient Association

| | | | | | | | | | |
|---|---|---|---|---|---|---|---|---|---|
| | | | All | All | | Carr | Carr | | |
| | | | Frq | Frq | | Frq | Frq | | |
| Markers | Alleles | pAllelic | Aff | Ctrl | pCarrier | Aff | Ctrl | #aff | # ctrl |

All patients (n = 804)

| | | | | | | | | | |
|---|---|---|---|---|---|---|---|---|---|
| D5S2000 | 0 | 0 | 0.24 | 0.18 | 0.001 | 0.43 | 0.33 | 744 | 429 |
| D5S2091 | 0 | 0 | 0.26 | 0.21 | 0.001 | 0.46 | 0.37 | 770 | 478 |
| AC022125-3 | 0 | 0 | 0.33 | 0.27 | 0 | 0.55 | 0.45 | 774 | 489 |
| D17-C | 0 | 0 | 0.36 | 0.29 | 0.007 | 0.6 | 0.52 | 756 | 395 |
| AC008833-6 | 0 | 0.001 | 0.67 | 0.61 | 0.018 | 0.88 | 0.84 | 781 | 472 |
| AC008818-1 | 0 | 0.001 | 0.29 | 0.24 | 0.001 | 0.51 | 0.41 | 773 | 482 |
| AC008829-5 | 2 | 0.006 | 0 | 0 | 0.005 | 0.1 | 0 | 645 | 474 |
| (1) D5S2000 D5S2091 | 0 | 0.002 | 0.17 | 0.11 | 0.004 | 0.3 | 0.22 | 552 | 325 |
| D17-C D17-B | | | | | | | | | |
| (2) D5S2091 D17-C | 0 | 0 | 0.19 | 0.13 | 0.001 | 0.34 | 0.25 | 597 | 380 |
| D17-B | | | | | | | | | |
| (3) AC008829-5 | 20146 | 0.002 | 0 | 0 | 0.002 | 0 | 0 | 579 | 431 |
| AC008833-2 | | | | | | | | | |
| AC008833-3 | | | | | | | | | |
| (4) AC022125-3 | 0 | 0.004 | 0.17 | 0.13 | 0.012 | 0.32 | 0.24 | 629 | 317 |
| AC008833-6 D5S2000 | | | | | | | | | |
| D5S2091 D17-C | | | | | | | | | |
| (5) D5S2071 | −2000 | 0.003 | 0.1 | 0 | 0.004 | 0.1 | 0 | 489 | 362 |
| AC008879-2 | | | | | | | | | |
| AC008818-1 | | | | | | | | | |
| AC008879-3 | | | | | | | | | |
| (6) AC008879-2 | 000 | 0 | 0.29 | 0.23 | 0.001 | 0.5 | 0.4 | 621 | 443 |
| AC008818-1 | | | | | | | | | |
| AC008879-3 | | | | | | | | | |
| (part 7) D5S2107 | 420 | 0.01 | 0 | 0 | 0.009 | 0 | 0 | 540 | 422 |
| AC008829-5 | | | | | | | | | |
| AC008833-2 | | | | | | | | | |

[0222] Swedish patients have also been genotyped and microsatellite single and multimarker association has been analyzed using the E-M algorithm. A total number of 943 Swedish patients (stroke patients and patients with carotid stenosis) and 322 Swedish controls were analyzed (results shown in Table 2). At least three haplotypes were more common in patients compared to controls, confirming in a second population that PDE4D shows association to stroke.

TABLE 2
Swedish Patient Association

| | | | All Frq | All Frq | | |
|---|---|---|---|---|---|---|
| Markers | Alleles | pAllelic | Aff | Ctrl | # aff | # ctrl |
| Swedish patients (n = 943) | | | | | | |
| D5S2000 | 2 | 0.0024 | | | 912 | 318 |
| (Sw 2) AC022125-3 | 0 0 2 0 | 0.006 | 0.035 | 0.01 | 717 | 284 |
| AC008833-6 D5S2000 | | | | | | |
| D5S2091 | | | | | | |
| (Sw-1) AC008804-2 D17-H | −2 4 −2 10 | 0.0028 | 0.057 | 0.05 | 672 | 113 |
| D17-G D5S2080 | | | | | | |
| AC008804-2 D17-H D17-G | −4 0 −2 | 0.0037 | 0.056 | 0.03 | 700 | 123 |

[0223] TABLE 2A
Association Based on Icelandic Stroke Patients

| | | | | | | # | | | |
|---|---|---|---|---|---|---|---|---|---|
| Phenotype | Marker | Allele | P_adj* | P_unadj** | RRisk*** | Affect | Freq. | # Ctrl | Freq. |
| All patients | AC008818-1 | 0 | 0.135 | 0.00337 | 1.23 | 829 | 0.297 | 887 | 0.255 |
| Cardiogenic/carotid | AC008818-1 | 0 | 0.0001 | 1.57 × 10−6 | 1.58 | 344 | 0.352 | 887 | 0.255 |

*p-values are adjusted for all markers in the one lod drop by randomizing the affecteds and controls
**one-sided p-value,
***Risk of the putative at-risk haplotype vs others, assuming the multiplicative model

[0224] Single microsatellite marker in PDE4D shows significant association to stroke in general, and even stronger association to carotid/cardiogenic stroke.

[0225] We further supported the association data described above using SNP markers and SNP haplotypes to verify the association of PDE4D to stroke. SNPs have the advantage that they are more stable than microsatellites (that is they do not mutate as frequently) although microsatellites can be more informative since they have a greater number of alleles. In practice, it is useful to show that a gene shows association using both types of markers.

[0226] New SNP Discovery

[0227] In an attempt to identify mutations, we sequenced (by PCR) all PDE4D exons and the intronic sequences immediately flanking the exons in 188 patients and 94 controls. Forty-six polymorphisms were identified; 2 non-synonymous SNPs, 42 other SNPs and 2 deletions were found within introns. Six of the SNPs identified by sequencing were found in publicly available SNP databases. The coding SNPs were typed for additional patients and controls using fluorescent-based methods (Chen, X., et al, Proc. Natl. Acad. Sci. USA 94, 10756-61 (1997)). These SNPs did not show any significant association to stroke. Therefore, a functional variation confering risk for stroke in the PDE4D gene may be within regulatory regions affecting transcription, splicing, message stability, or message transport of one or more isoforms or in exons that we have not discovered yet.

[0228] Having typed all identified microsatellites in the PDE4D gene, we then looked for SNPs in the intronic regions to define blocks of linkage disequilibrium (LD) and corroborate the observed microsatellite association results. The SNPs were identified in the public NCBI SNP database or by sequencing selected regions in the gene in patients and controls. A total of 95 SNPs were typed over the PDE4D gene and vicinity in approximately 500 patients and 140 controls. The modified E-M algorithm was used to derive the most likely haplotypes and to test if they are in excess in patients compared to controls. We found several haplotypes showing association to stroke (results shown in Table 5). We used a second method of analysis to confirm these SNP haplotype associations to stroke. Selected SNPs showing single marker association to stroke in patients were typed for a subset of relatives in order to derive haplotypes using Allegro (instead of the EM algorithm) for haplotype association analysis (results are shown in Tables 4A and 4B). Note that several of the same stroke-associated haplotypes found using the EM algorithm match those found using Allegro derived haplotypes. SNP haplotypes 1 and 2 are located upstream of D8 exon, SNP haplotype 3 is located upstream of D9 exon and stretches over it, SNP haplotype 4 stretches over LF1 exon.

[0229] We have found several stroke-associated haplotypes within the PDE4D gene using two types of markers (microsatellites or SNPs) and using different methods of deriving haplotypes confirming that PDE4D is a gene conferring risk for stroke. In an attempt to further understand the magnitude of the increased risk that PDE4D haplotypes confer on stroke, we looked for more SNPs for more focused haplotype association analysis. We have sequenced a total of 270,000 bp in 47 patients and 47 controls. The sequenced region extends from appr 92,000 bp upstream of the first PDE4D exon (the exon called PDE4D7A-1) and 184,000 bp downstream of this exon (i.e., going into the PDE4D gene). We identified and tested a total of 637 SNPs but 260 SNPs were selected for further genotyping. SNPs for further genotyping based were typically selected on their frequency or the need for additional information on the underlying LD structure.

[0230] More than 800 patients and 700 controls were genotyped (the same subset as for the microsatellite genotyping). The best single point association remained at the 5′ end of PDE4D. Several SNPs showed significant association to carotid and cardiogenic subtypes of stroke. The p-values for two of the SNPs, SNP5PDM357221 (SNP 45) and SNP5PDM361545 (SNP 41), were significant even when adjusted for the 260 SNPs tested in the region by randomization of the phenotype. SNP5PD357221 is approximately 500 base pairs downstream of the 5′ PDE4D7A exon and SNP5PDM361545 approximately 4000 base pairs upstream of this exon. Both SNPs are within 6 kb of the microsatellite marker AC008818-1. See Table 3.

TABLE 3
SNP allelic association

| | | Abbreviated | | | | | | | | |
|---|---|---|---|---|---|---|---|---|---|---|
| | | marker | | | | | | | | |
| Phenotype | DeCODE name | name | Allele | p-value | p-value* | RR | # Aff. | Aff. % | # Ctrl | Ctrl. % |
| Cardiogenic/ | SNP5PDM357221 | SNP 45 | 2 | 1.80E−05 | 0.02 | 1.77 | 309 | 86.2 | 492 | 77.9 |
| carotid | | | | | | | | | | |
| | SNP5PDM361545 | SNP 41 | 0 | 4.09E−05 | 0.03 | 1.86 | 236 | 86.0 | 368 | 76.8 |

*adjusted p-value

[0231] As the strongest single marker association, both for microsatellites and SNP's, was observed in the 5′ region of the PDE4D gene, we restricted our investigation of the haplotype structure to this region. To simplify the analysis we only included SNPs with greater than 20% minor allele frequency in this part of the analysis and examined 74 SNPs that were distributed across approximately 600 kb region. The bulk of this region can be roughly divided into three Linkage disequilibrium (LD)-blocks: block A is around 300 kb and includes 19 SNPs, block B is 200 kb and includes 21 SNPs, and block C is 60 kb and includes 26 SNPs. Within each of these blocks there is limited haplotype diversity in less than 10 common haplotypes (i.e., with more than 2% frequency) account for more than 80% of all observed haplotypes. Constructing haplotypes across the boundaries between those blocks led to substantial increase in the haplotype diversity.

[0232] We tested the common haplotypes in each of the three blocks for association to patients with cardiogenic and carotid stroke subtypes. The most significant haplotype appears in the first row of each block in Table 4A, and the results of the association tests are also summarized. Both in block B and C, we observed very strong association (p-values=2.4×10⁻⁴ and 2.1×10⁻⁴) to haplotypes with relative risk around 1.6, comparable to the relative risk observed for the associated allele 0 in the microsatellite marker AC008818-1. In block A we only observe a marginally significant haplotype association. By combining the at-risk-haplotypes from blocks B and C, we constructed a haplotype spanning 260 kb that is significantly associated to the cardiogenic and carotid subtypes (P-value=1.8×10⁻⁵) with 14.7% haplotype frequency in patients versus 7.5% frequency in controls (this corresponds to 31% of stroke patients carrying the haplotype versus 16% of controls). The corresponding relative risk is 2.13 and the population-attributable risk is 15%. The frequency of this haplotype in the whole stroke patient group was 10.3% (22% carrier frequency), with a relative risk of 1.46 and PAR of (P-value=0.013). See Table 4B for a description of the alleles and polymorphisms from the two most significant haplotypes shown in Blocks B and C of Table 4A.

TABLE 4A
Haplotype diversity at the 5′end of the PDE4D gene.
All haplotypes shown that have >2% population frequency within all of the 3 blocks
of strong LD (see FIG. 4).
Block A:

| SNP 102 | SNP 101 | SNP 100 | SNP 99 | SNP 98 | SNP 97 | SNP 96 | SNP 95 | SNP 93 | SNP 92 | SNP 90 | SNP 88 | SNP 87 | SNP 86 | SNP 84 | SNP 83 | p-value | Aff. % | Ctrl. % | RR |
|---|---|---|---|---|---|---|---|---|---|---|---|---|---|---|---|---|---|---|---|
| 3 | 2 | 0 | 2 | 0 | 2 | 0 | 2 | 3 | 0 | 2 | 1 | 2 | 2 | 3 | 1 | 0.0151 | 26.7 | 22.2 | 1.28 |
| 1 | 1 | 2 | 0 | 2 | 0 | 2 | 0 | 1 | 2 | 2 | 1 | 2 | 2 | 3 | 1 | 0.1830 | 2.1 | 2.9 | 0.73 |
| 1 | 1 | 2 | 0 | 2 | 0 | 2 | 0 | 1 | 2 | 0 | 3 | 2 | 2 | 0 | 3 | 0.1515 | 2.6 | 3.6 | 0.71 |
| 1 | 1 | 2 | 0 | 2 | 0 | 2 | 0 | 1 | 2 | 0 | 3 | 0 | 2 | 0 | 3 | 0.1675 | 22.5 | 24.5 | 0.89 |
| 1 | 2 | 0 | 2 | 0 | 2 | 0 | 2 | 3 | 0 | 2 | 1 | 2 | 0 | 0 | 3 | 0.1080 | 12.6 | 10.6 | 1.23 |
| 1 | 1 | 0 | 2 | 0 | 2 | 0 | 2 | 3 | 0 | 2 | 1 | 2 | 0 | 0 | 3 | 0.4380 | 2.2 | 2.4 | 0.94 |
| 1 | 1 | 0 | 2 | 0 | 2 | 0 | 2 | 1 | 0 | 0 | 3 | 2 | 2 | 3 | 1 | 0.0005 | 6.5 | 11.2 | 0.55 |
| 1 | 2 | 0 | 2 | 0 | 2 | 0 | 2 | 3 | 0 | 2 | 1 | 2 | 0 | 0 | 3 | 0.2005 | 7.9 | 6.6 | 1.20 |

Block B:

| SNP- | SNP- | SNP- | SNP- | SNP- | SNP- | SNP- | SNP- | SNP- | SNP- | SNP- | SNP- | SNP- | | | | | | | | | | | | | |
|---|---|---|---|---|---|---|---|---|---|---|---|---|---|---|---|---|---|---|---|---|---|---|---|---|---|
| 77 | 76 | 73 | 71 | 69 | 67 | 66 | 64 | 63 | 62 | 61 | 59 | 57 | SNP-56 | SNP-54 | SNP-53 | SNP-49 | SNP-48 | SNP-45 | SNP-42 | SNP-41 | SNP-39 | P-value | Aff % | Ctrl % | RR |
| 0 | 0 | 3 | 2 | 3 | 0 | 0 | 2 | 0 | 0 | 1 | 0 | 2 | 3 | 0 | 1 | 1 | 3 | 2 | 0 | 0 | 3 | 0.00037 | 29.2 | 21.4 | 1.52 |
| 0 | 0 | 3 | 2 | 3 | 0 | 0 | 2 | 0 | 1 | 3 | 0 | 0 | 0 | 0 | 3 | 3 | 1 | 0 | 2 | 2 | 0 | 0.00710 | 4.3 | 7.6 | 0.55 |
| 2 | 0 | 1 | 0 | 3 | 0 | 0 | 2 | 0 | 0 | 1 | 0 | 2 | 3 | 0 | 1 | 1 | 3 | 2 | 0 | 0 | 3 | 0.95800 | 2.0 | 2.1 | 0.98 |
| 2 | 0 | 1 | 0 | 3 | 2 | 2 | 0 | 2 | 0 | 3 | 0 | 0 | 0 | 0 | 3 | 3 | 1 | 2 | 2 | 0 | 3 | 0.61000 | 6.2 | 5.6 | 1.13 |
| 2 | 0 | 1 | 0 | 3 | 2 | 2 | 0 | 2 | 1 | 3 | 0 | 0 | 0 | 0 | 3 | 3 | 1 | 0 | 2 | 2 | 0 | 0.01040 | 3.4 | 6.3 | 0.52 |
| 2 | 2 | 1 | 0 | 3 | 2 | 0 | 2 | 0 | 0 | 1 | 1 | 2 | 3 | 2 | 3 | 1 | 3 | 2 | 0 | 0 | 3 | 0.80300 | 14.6 | 14.1 | 1.04 |
| 2 | 2 | 1 | 0 | 2 | 2 | 0 | 2 | 0 | 0 | 1 | 1 | 2 | 3 | 2 | 3 | 1 | 3 | 2 | 0 | 0 | 3 | 0.97000 | 15.7 | 15.8 | 0.99 |

Block C:

| SNP | SNP | SNP | SNP | SNP | SNP | SNP | SNP | SNP | SNP | SNP | SNP | SNP | SNP | SNP | SNP | SNP | SNP | SNP | SNP | SNP | SNP | SNP | SNP | SNP | | | | |
|---|---|---|---|---|---|---|---|---|---|---|---|---|---|---|---|---|---|---|---|---|---|---|---|---|---|---|---|---|
| 37 | 35 | 34 | 32 | 31 | 30 | 28 | 27 | 26 | 24 | 23 | 22 | 20 | 19 | 16 | 15 | 14 | 13 | 12 | 6 | 5 | 4 | 3 | 2 | 1 | p-value | Aff. % | Ctrl. % | RR |
| 3 | 0 | 0 | 2 | 1 | 0 | 1 | 2 | 0 | 0 | 1 | 3 | 3 | 0 | 3 | 3 | 2 | 0 | 0 | 3 | 3 | 3 | 2 | 0 | 0 | 0.0003 | 22.2 | 15.4 | 1.58 |
| 2 | 0 | 0 | 2 | 1 | 0 | 1 | 2 | 0 | 0 | 3 | 1 | 1 | 2 | 1 | 1 | 2 | 0 | 2 | 1 | 0 | 3 | 1 | 0 | 0 | 0.2665 | 2.2 | 2.8 | 0.78 |
| 2 | 0 | 0 | 2 | 1 | 0 | 1 | 2 | 0 | 0 | 3 | 1 | 1 | 2 | 1 | 1 | 2 | 0 | 2 | 3 | 3 | 3 | 2 | 0 | 0 | 0.1200 | 3.0 | 2.0 | 1.52 |
| 2 | 0 | 0 | 2 | 1 | 0 | 1 | 2 | 0 | 3 | 3 | 1 | 3 | 0 | 1 | 1 | 0 | 2 | 2 | 1 | 0 | 1 | 1 | 3 | 2 | 0.1510 | 2.6 | 1.8 | 1.46 |
| 2 | 2 | 1 | 0 | 3 | 1 | 1 | 2 | 0 | 0 | 1 | 3 | 3 | 0 | 3 | 3 | 2 | 0 | 0 | 3 | 3 | 3 | 2 | 0 | 0 | 0.1290 | 2.0 | 3.0 | 0.68 |
| 2 | 2 | 1 | 0 | 3 | 1 | 1 | 2 | 0 | 0 | 3 | 1 | 1 | 2 | 1 | 3 | 2 | 0 | 2 | 1 | 0 | 3 | 1 | 3 | 2 | 0.0039 | 7.8 | 12.0 | 0.62 |
| 2 | 2 | 1 | 0 | 3 | 1 | 2 | 0 | 2 | 3 | 3 | 1 | 3 | 0 | 1 | 1 | 0 | 2 | 2 | 1 | 0 | 1 | 1 | 3 | 2 | 0.3905 | 32.9 | 33.6 | 0.97 |

Allelic definitions and polymorphisms for SNPs in the two most significant haplotypes (in block B and C).

[0233] TABLE 4B

| | | | Public | | | | | |
|---|---|---|---|---|---|---|---|---|
| | Position in | Abbreviated | name if | | | | | |
| DeCODE name | sequence | name | available | polymorphism | allele 1 | base | allele 2 | base |
| SNP5PDM161561 | 338440 | SNP 77 | | A/G | 0 | A | 2 | G |
| SNP5PDM166786 | 333215 | SNP 76 | | A/G | 2 | G | 0 | A |
| SNP5PDM211974 | 288027 | SNP 73 | | T/C | 3 | T | 1 | C |
| SNP5PDM218639 | 281362 | SNP 71 | | A/G | 0 | A | 2 | G |
| SNP5PDM236461 | 263539 | SNP 69 | rs1423248 | G/T | 2 | G | 3 | T |
| SNP5PDM261488 | 238513 | SNP 67 | | A/G | 2 | G | 0 | A |
| SNP5PDM265669 | 234332 | SNP 66 | | A/G | 0 | A | 2 | G |
| SNP5PDM275805 | 224195 | SNP 64 | rs1423247 | A/G | 2 | G | 0 | A |
| SNP5PDM280894 | 219106 | SNP 63 | rs789389 | A/G | 0 | A | 2 | G |
| SNP5PDM285592 | 214409 | SNP 62 | | C/A | 0 | A | 1 | C |
| SNP5PDM296955 | 203046 | SNP 61 | rs2441064 | T/C | 1 | C | 3 | T |
| SNP5PDM307243 | 192757 | SNP 59 | rs37684 | C/A | 1 | C | 0 | A |
| SNP5PDM310220 | 189780 | SNP 57 | rs401207 | A/G | 2 | G | 0 | A |
| SNP5PDM310653 | 189348 | SNP 56 | rs702553 | T/A | 3 | A | 0 | A |
| SNP5PDM326519 | 173481 | SNP 54 | rs27223 | A/G | 2 | G | 0 | A |
| SNP5PDM329913 | 170088 | SNP 53 | | T/C | 1 | C | 3 | T |
| SNP5PDM349039 | 150961 | SNP 49 | rs27220 | T/C | 1 | C | 3 | T |
| SNP5PDM351840 | 148161 | SNP 48 | rs37760 | T/C | 3 | T | 1 | C |
| SNP5PDM357221 | 142780 | SNP 45 | | A/G | 2 | G | 0 | A |
| SNP5PDM361194 | 138806 | SNP 42 | rs153031 | A/G | 0 | A | 2 | G |
| SNP5PDM361545 | 138456 | SNP 41 | | A/G | 0 | A | 2 | A |
| SNP5PDM364360 | 135641 | SNP 39 | rs3887175 | T/A | 3 | T | 0 | A |
| SNP5PDM364888 | 135112 | SNP 37 | rs26956 | G/T | 2 | G | 3 | T |
| SNP5PDM367438 | 132562 | SNP 35 | rs26955 | A/G | 0 | A | 2 | G |
| SNP5PDM368135 | 131865 | SNP 34 | rs27653 | C/A | 0 | A | 1 | C |
| SNP5PDM370640 | 129361 | SNP 32 | rs456009 | T/C | 2 | Y | 0 | A |
| SNP5PDM370641 | 129360 | SNP 31 | rs457053 | T/C | 1 | C | 3 | T |
| SNP5PDM374696 | 125304 | SNP 30 | rs27221 | C/A | 0 | A | 1 | C |
| SNP5PDM376575 | 123426 | SNP 28 | rs35387 | G/C | 2 | G | 1 | C |
| SNP5PDM376688 | 123312 | SNP 27 | rs35386 | A/G | 0 | A | 2 | G |
| SNP5PDM379372 | 120628 | SNP 26 | rs40512 | A/G | 0 | A | 2 | G |
| SNP5PDM381086 | 118914 | SNP 24 | rs35385 | T/A | 3 | W | 0 | A |
| SNP5PDM388220 | 111781 | SNP 23 | rs26953 | T/C | 3 | T | 1 | C |
| SNP5PDM388749 | 111252 | SNP 21 | rs26954 | T/C | 3 | T | 1 | C |
| SNP5PDM392152 | 107849 | SNP 19 | rs4133470 | A/G | 0 | A | 2 | G |
| SNP5PDM394776 | 105225 | SNP 16 | rs35384 | T/C | 3 | T | 1 | C |
| SNP5PDM395449 | 104552 | SNP 15 | rs35382 | T/C | 3 | T | 1 | C |
| SNP5PDM397023 | 102977 | SNP 14 | rs26950 | A/G | 0 | A | 2 | G |
| SNP5PDM399206 | 100795 | SNP 13 | rs26949 | A/G | 2 | G | 0 | A |
| SNP5PDM400966 | 99035 | SNP 12 | rs153153 | A/G | 2 | R | 0 | A |
| SNP5PDM411387 | 88614 | SNP 6 | | T/C | 3 | T | 1 | C |
| SNP5PDM411544 | 88456 | SNP 5 | rs27564 | T/A | 3 | W | 0 | A |
| SNP5PDM416882 | 83119 | SNP 4 | | T/C | 1 | T | 3 | C |
| SNP5PDM417756 | 82244 | SNP 3 | rs187481 | G/C | 2 | G | 1 | C |
| SNP5PDM419874 | 80127 | SNP 2 | rs152341 | T/A | 0 | A | 3 | C |
| SNP5PDM421449 | 78552 | SNP 1 | rs248911 | A/G | 0 | A | 2 | G |

[0234] The analysis presented above represents a conservative analysis of the data since it restricted the analysis to SNPs with minor allelic frequencies of less than 20%. To further understand the magnitude of the contribution of PDE4D to stroke in this 5 prime region, we repeated the analysis without such restrictions, including all SNPs selected for genotyping. We found a SNP haplotype (Table 6C) significantly associated with the disease that is more common than the haplotype presented above in FIG. 4. The strongest association found for this PDE4D haplotype was to the two major subtypes of ischemic stroke, carotid and cardiogenic stroke (Table 6C). The 5 SNP haplotype extends over an area of 48 kb and is just upstream of the 5′exon covering the presumed promoter region of isoform PDE4D7. It captures the same information as the 0 allele for marker AC008818-1. However, the SNP haplotype is more specific in the sense that it has a higher relative risk, i.e., 2.3. This haplotype is carried by 47% of the patients and has the same population attributable risk (PAR) of 0.25. The polymorphisms and alleles for the SNPs are presented in Table 6B.

[0235] In summary, this single SNP haplotype (which is only one haplotype of the several found above but is probably the most tightly associated to stroke) more than doubles an individual's risk for cardiogenic and carotid stroke and accounts for 25% of such strokes in Iceland. The other haplotypes described above provide additional risk for stroke. The magnitude of this risk haplotype is comparable or higher than the well-known clinical risk factors for stroke such as hypertension, diabetes, hyperlipidemia, and smoking.

TABLE 5
SNP haplotype analysis based E-M algorithm

| | | | | All | All | | |
|---|---|---|---|---|---|---|---|
| SNP | | Alleles in | | Frq | Frq | | |
| haplotype | Position | Haploytpe | pAllelic | Aff | Ctrl | #Aff | #Ctrl |
| SNP-1 | 1273143- | 122303 | 0.01 | 0.32 | 0.25 | 505 | 155 |
| | 1269965 | | | | | | |
| SNP-2 | 1260358- | 10323 | 0.028 | 0.33 | 0.26 | 631 | 131 |
| | 1254849 | | | | | | |
| SNP-3 | 1399767- | 2313002 | 0.009 | 0.26 | 0.18 | 759 | 149 |
| | 1318510 | | | | | | |
| SNP-4 | 1422008- | 111330 | 0.03 | 0.56 | 0.48 | 344 | 128 |
| | 1410824 | | | | | | |

[0236] Alleles are shown in Table 6B.

TABLE 6A
SNP haplotype analysis

| SNP | | Alleles in | | Allelic | All | | |
|---|---|---|---|---|---|---|---|
| haplo- | | haplo- | | Frq | Frq | | |
| type | Position | type | PAllelic | Aff | Ctrl | # Aff | # Ctrl |
| SNP-1 | 1273143- | 122303 | 4.27E−04 | 0.31 | 0.18 | 111 | 149 |
| | 1269965 | | | | | | |
| SNP-2 | 1260358- | 10323 | 0.0043 | 0.32 | 0.2 | 114 | 128 |
| | 1254849 | | | | | | |
| ⁽¹⁾SNP-5 | 1425923- | 011032 | 4.014E−04 | 0.178 | 0.126 | 1070 | 793 |
| | 1257206 | | | | | | |
| ⁽²⁾SNP-6 | 263539- | 3321000 | 1.50E−06 | 0.30 | 0.20 | 415 | 673 |
| | 120628 | | | | | | |

⁽¹⁾This haplotype is a 6 SNP haplotype and was identified in analysis based on all stroke patients.
⁽²⁾This haplotype is a 5 SNP and 2 microsatellite marker haplotype identified in stroke patients with the subphenotype cardiogenic and large vessel disease.

[0237] TABLE 6B
SNPs in the identified SNP haplotypes

| | | Public | | | |
|---|---|---|---|---|---|
| Haplo- | | name | | | Allele |
| type | SNP | if available | Polymorphism | Position | (nucleotide) |
| SNP2 | 1 | SNP5PD754849 | T/C | 1254849 | 3 (T) |
| SNP2 | 2 | SNP5PD757206 | A/G | 1257206 | 2 (G) |
| SNP2 | 3 | TSC0538885 | T/C | 1257624 | 3 (T) |
| SNP2 | 4 | SNP5PD759581 | A/C | 1259581 | 0 (A) |
| SNP2 | 5 | rs244579 | T/C | 1260358 | 1 (C) |
| SNP1 | 1 | rs35284 | T/C | 1269965 | 3 (T) |
| SNP1 | 2 | rs35283 | A/G | 1270041 | 0 (A) |
| SNP1 | 3 | rs35281 | A/G | 1270553 | 3 (A) |
| SNP1 | 4 | rs35280 | G/A | 1272125 | 2 (G) |
| SNP1 | 5 | SNP5PD772910 | A/G | 1272910 | 2 (G) |
| SNP1 | 6 | rs35279 | G/C | 1273143 | 1 (C) |
| SNP3 | 1 | rs255652 | A/G | 1318510 | 2 (G) |
| SNP3 | 2 | rs27547 | G/A | 1371388 | 0 (A) |
| SNP3 | 3 | rs26695 | G/A | 1390407 | 0 (A) |
| SNP3 | 4 | rs27773 | C/T | 1391020 | 3 (T) |
| SNP3 | 6 | rs26705 | C/T | 1392198 | 3 (T) |
| SNP3 | 7 | rs26701 | G/C | 1399767 | 2 (G) |
| SNP4 | 1 | rs464311 | A/G | 1410824 | 0 (A) |
| SNP4 | 2 | rs1867725 | T/C | 1412604 | 3 (T) |
| SNP4 | 3 | rs153966 | T/C | 1414091 | 3 (T) |
| SNP4 | 4 | SNP5PD914804 | C/T | 1414804 | 1 (C) |
| SNP5 | 1 | rs27172 | A/G | 1425923 | 0 (A) |
| SNP5 | 2 | rs1988803 | C/A | 1415979 | 1 (C) |
| SNP5 | 3 | SNP5PD914804 | C/T | 1414804 | 1 (C) |
| SNP5 | 4 | rs27547 | A/G | 1371388 | 0 (A) |
| SNP5 | 5 | rs27171 | C/T | 1307403 | 3 (T) |
| SNP5 | 6 | SNP5PD757206 | A/G | 1257206 | 2 (G) |
| SNP6 | 1 | rs1423248 | G/T | 263539 | 3 (T) |
| SNP6 | 2 | rs918590 | G/T | 252772 | 3 (T) |
| SNP6 | 3 | rs401207 | G/A | 189780 | 2 (G) |
| SNP6 | 4 | rs251726 | G/C | 175259 | 1 (C) |
| SNP6 | Marker 5 | AC008879-2 | Allele 0 (allele | 171240 | 0* |
| | | | number based on | | |
| | | | CEPH value) | | |
| SNP6 | Marker 5 | AC008818-1 | Allele 0 (allele | 136550 | 0** |
| | | | based on CEPH) | | |
| SNP6 | 6 | rs40512 | G/A | 120628 | 0 (A) |
| SNP7 | 1 | SNP5PDM361194 | A/G | 138806 | 0 (A) |
| | | (rs153031) | | | |
| SNP7 | 2 | SNP5PDM368135 | C/A | 131865 | 0 (A) |
| | | (rs27653) | | | |
| SNP7 | 3 | SNP5PDM370640 | C/T | 129361 | 1 (C) |
| | | (rs456009) | | | |
| SNP7 | 4 | SNP5PDM379372 | G/A | 120628 | 0 (A) |
| | | (rs40512) | | | |
| SNP7 | 5 | SNP5PDM408531 | G/A | 91470 | 0 (A) |
| | | (new) | | | |

[0238] Alleles #'s: For SNP alleles A=0, C=1, G=2, T=3; for microsatellite alleles: the CEPH sample 1347-02 (CEPH genomics repository) is used as a reference, the lower allele of each microsatellite in this sample is set at 0 and all other alleles in other samples are numbered accordingly in relation to this reference. Thus allele1 is 1 bp longer than the lower allele in the CEPH sample 1347-02, allele 2 is 2 bp longer than the lower allele in the CEPH sample 1347-02, allele 3 is 3 bp longer than the lower allele in the CEPH sample 1347-O₂, allele 4 is 4 bp longer than the lower allele in the CEPH sample 1347-02, allele-1 is 1 bp shorter than the lower allele in the CEPH sample 1347-O₂, allele-2 is 2 bp shorter than the lower allele in the CEPH sample 1347-02, and so on. Note that this same CEPH sample is a standard that is widely used throughout the world for calibration and comparison of alleles.

[0239] * AC008879-2, allele 0 is the same allele as the minimum allele observed in CEPH 1347-02, family 137, individual 02.

[0240] ** AC008818-1, allele 0 is the same allele as the minimum allele observed in CEPH 1347-02, family 137, individual 02.

TABLE 6C

| | SNP5PDM- | SNP5PDM- | SNP5PDM- | SNP5PDM- | SNP5PDM- | | # | Aff. | # | Ctrl. | R- | | |
|---|---|---|---|---|---|---|---|---|---|---|---|---|---|
| Phenotype | 361194 | 368135 | 370640 | 379372 | 408531 | p-value | Affect | Freq.* | Ctrl | Freq* | risk | PAR | info |
| All stroke | 0 | 0 | 2 | 0 | 0 | 2.17E−05 | 988 | 0.19 | 652 | 0.12 | 1.8 | 0.16 | 0.604 |
| Cardio- | 0 | 0 | 2 | 0 | 0 | 3.37E−07 | 313 | 0.236 | 652 | 0.119 | 2.3 | 0.25 | 0.616 |
| genic/ | | | | | | | | | | | | | |
| carotid | | | | | | | | | | | | | |

*allelic frequency

[0241] The sequences for the microsatellite markers are as follows:

AC008879-2 amplimer:

(SEQ ID NO:85)

ACAAAGAGCACCTTTCCAGTGGACAACTAACTAAAGTGGTGTGATTTTGG
TATAAGTTTGTGTGTGTGTGTGTGTGTGTGTTGTGTGTGTGTGTATGTGT
ATACATTTAGTTTTATTGTAACAAAGCAACTTGTACTTTTCACGTTTAAA
A
AC008818-1 amplimer:

(SEQ ID NO:86)

TGCTTGGTGAAGGAATAGCCACCCCAGAGAAGGAGTATGGACTTCTATAC
ACAATCATTCATTCATTCATTCATTCATTCATTCATTCATTCATTCACTA
CTCATGCATGATCTTTGTCCTTATCTTCCTCCACTGTCACATGAATACCC
ACCCACTGCACCTACCTGCTTCCTATTCCTGAGAACCCAGGCTC

[0242] TABLE 7

| | | | | | | Allelic | Allelic | |
|---|---|---|---|---|---|---|---|---|
| Public name or | Polymor- | | Allele | p-value | p-value | frq in | frq in | |
| deCODE name | phism | Position | (nucleotide) | adjusted | unadjusted | patients | ctrls | RR |
| SNP5PDM357221 | A/G | 142780 | 2 (G) | 0.0025 | 3.93E−05 | 86% | 78% | 1.836 |
| SNP5PDM364360 | T/A | 135641 | 3 (T) | 0.0081 | 1.56E−04 | 84% | 77% | 1.656 |
| SNP5PDM361545 | A/G | 138456 | 0 (A) | 0.04 | 4.09e−05 | 86% | 77% | 1.86 |

[0243] These SNPs show strong association in patients with cardioembolic and large vessel disease.

[0244] Table 8A and 8B show previously known microsatellite markers and novel microsatellites in sequence. Forward and reverse primers are shown.

TABLE 8A
Previously Known microsatellite markers in sequence

| | Accession | | SEQ ID | | SEQ ID |
|---|---|---|---|---|---|
| | number | Forward primer | NO. | Reverse primer | NO. |
| D5S2107 | DB:614475 | AGCCTTTGGGCCAACA | 15 | CAAACCAACAGGAGTATGTACTTTT | 16 |
| D5S468 | GDB:593646 | AAATGAATGGTAGATTTAACCTGAG | 17 | TGGGAAAATAAATACATGCG | 18 |
| D5S2000 | GDB:608769 | TTATACCAGGAGAGTAGACTTTTTT | 19 | CATGCTAATTTCAAATATGAGAG | 20 |
| D5S2091 | GDB:613806 | GCATTTGTCATGTGCCA | 21 | GGTATTTCATTCACAGCCAGTC | 22 |
| D5S2500 | GDB:683034 | TTAAAGGAGTGATCTCCCCC | 23 | GTTACAGTACCTATGGTCATGCC | 24 |
| D5S2080 | DB:613188 | GCACTGTGAATTTCAAATG | 25 | GTCAGGGGACTGGGAT | 26 |
| D5S2018 | GDB:609957 | CCTGTAAACAATGAAAACCCACTGA | 27 | AGACTATGCTGTGTGTGTGCCTG | 28 |
| D5S2071 | GDB:612756 | TCTGGGTTTACAACCTTCAAA | 29 | TAACTGGCTTGGCCCG | 30 |

[0245] TABLE 8B
Novel microsatellites in sequence:

| | | SEQ ID | | SEQ ID |
|---|---|---|---|---|
| | Forward primer | NO. | Reverse primer | NO. |
| DG5S382 | CAGTAAATAGTTTGCTTCAGGCATT | 31 | CTCATACTCTGCGTGGCTTG | 32 |
| AC008829-5 | AGGGCTAAGTGGATCACAGC | 33 | AGAGGGTCTTGCCACTGTGT | 34 |
| AC008833-2 | TCTGCAAGACTCTCGGTGCT | 35 | TGCAGATCTCATATTTCCATGTTT | 36 |
| AC008833-3 | TCTGCCCTTTGTTCCTCATC | 37 | GTCAAGGGAGTGATGGCAGT | 38 |
| AC022125-3 | AAAATGACTGCCTCCCACAA | 39 | GGGAAATCATACTGCCCTCA | 40 |
| AC008833-6 | AAACATAGCCACCCTGTTGC | 41 | TCCAAAGCCCTTAGCTTAATCA | 42 |
| D17-C | GCTCCCTGGACTGTGGTAAA | 43 | GCCACATTGCTGTCACATTT | 44 |
| D17-B | TTTTTCAGGGCTGGGTAGAA | 45 | TCCAAAGGAAGTGAAATCAGTG | 46 |
| D17-D | CTAACCCATCCTCACCCAAT | 47 | TGTGGCATACAGGGAAGTGA | 48 |
| AC008804-1 | GTGCTGGAATTTGGCTCCTA | 49 | CAAACATCATTTTGCCTTGC | 50 |
| AC008804-2 | TCCCAAACGATAGCTGTTGC | 51 | GAATTAGGACGGTGGCTCAA | 52 |
| AC008804-3 | TTTGCATTCATCACTCATTCG | 53 | CCCGTAGCATCTGATCCAGT | 54 |
| D17-H | AGAAAGCTTCCCCTCCACTG | 55 | CATTCCAGCCTGAGCTACAA | 56 |
| D17-G | TGGGCTCCAATTATCCTTCC | 57 | TGCAGTTTGCACTCTCCTTG | 58 |
| AC027322-12 | TTATCTGTTTCCCCATGCTTTT | 59 | TGTTACATCTTGATCTATGACGTTT | 60 |
| AC027322-10 | TGTATCCTGCATCCCTTGTT | 61 | GGAATAACCCAAAAGTAATTGTAGTGA | 62 |
| AC027322-9 | TCGTGCCAAGATGAAAATGA | 63 | AAACCTCCCTGATCATCTGAA | 64 |
| AC027322-8 | ACAGAGGAGCAAAGGAATCA | 65 | TTGGCACGAATCACTCTCTG | 66 |
| AC027322-3 | CCCCATTTGGATGATGGTAA | 67 | TGAGAACATCTAACGTCTTTTTCAA | 68 |
| AC027322-5 | GGCACAGATAACTGGGAAGC | 69 | CCCCCAAAAGTACTGCATAAA | 70 |
| DG5S397 | ATGTTGGCATTTGGTGAGGT | 71 | CACCTGTCCCTTTGGAGGTA | 72 |
| AC008879-2 | TTTTAAACGTGAAAAGTACAAGTTGC | 73 | ACAAAGAGCACCTTTCCAGTG | 74 |
| *AC008818-1 | TGCTTGGTGAAGGAATAGCC | 75 | GAGCCTGGGTTCTCAGGAAT | 76 |
| **AC008879-3 | GGCAAGAACAGTTTGGAGGA | 77 | GACTGCTGTTTGCTGGTTGA | 78 |
| AC020733-1 | AAATGGCTATAAAGTGCTTTGAAC | 79 | CGGTCTCAACAACCAGAACA | 80 |
| AC016591-2 | CAGAAACACACAGAAGTCATTCAA | 81 | CAGACCCAATTAATGGCAAAA | 82 |
| DG5S405 | TCTGTCTTCTTTGACCCATGAAT | 83 | CAACACAGCGAGACCTCATC | 84 |

*Product Size 194, tetranucleotide repeat
**Product Size 150; dinucleotide repeat

[0246] Discussion of Stroke Gene Identification

[0247] Genealogy, a comprehensive population-based list of broadly defined stroke patients and non-parametric allele sharing methods have been combined to successfully map a major gene to chromosome 5 for one of the most complex diseases known. We then used a large case-control association study that showed that PDE4D is the gene in this location that is the gene conferring substantial risk for stroke. This is the first gene ever mapped and isolated for the common forms of stroke. There was no correlation between the contribution of the families to this gene location and hypertension, diabetes or hyperlipidemias and this gene does not match any known gene contributing to these risk factors. The types of stroke studied in this work do not reflect a rare or Icelandic-specific form of stroke; rather, the diversity of the stroke phenotypes in Icelanders as well as risk factors are similar to those of most other Caucasian populations (Agnarsson, U., et al, Ann. Intern. Med., 130:987 (1999); Eliasson, J. H., et al., Loeknabla [symbol] i [symbol] , 85:517-25 (1999); Sveinbjörnsdottir, S., et al., Systematic registration of patients with Stroke and TIA admitted to The National University Hospital, Reykjavik, Iceland, in 1997, XIII. Meeting of the Icelandic Association in Internal Medicine, Akureyri, Iceland (Laenabladid, 1998); Valdimarsson, E. M., et al., Loeknabladid 84:921 (1998)).

[0248] The magnitude of the risk and the frequency of the disease haplotypes in the general population confirms that we have mapped a gene for the common forms of stroke and not some rare form of stroke. This gene almost doubles one's risk for stroke in general, and more than doubles one's risk for the two most common subtypes of stroke, carotid and cardiogenic stroke. In addition, the most common disease haplotype has a population attributed risk of 25% (which means it accounts for 25% of the patients) and there are other haplotypes that we describe herein that are less common that accounts for other patients. Thus PDE4D is a major cause of stroke and its relative risk rivals those of hypertension, smoking, diabetes, and hyperlipidemia. PDE4D shows tighter correlation to the forms of stroke dependent on atherosclerosis (carotid and cardiogenic stroke) and it is expressed in cell types known to be important for atherosclerosis such as vascular smooth muscle cells, macrophages, and endothelial cells. This suggests that the strong effect that PDE4D variation has on stroke risk is through its role in the vascular biology of atherosclerosis (see discussion at the end of the examples). Example 2 details our sequencing of the entire PDE4D gene and the definition of its exon-intron structure based on new and old cDNAs, and Example 3 shows that the expression pattern of PDE4D isoforms correlates with a stroke associated haplotype.

### Example 2

### Sequencing and Characterization of the Human Gene and its RNA/Protein Isoforms

[0249] Sequence of the Stroke Gene Region

[0250] At the start of our work, there was little genomic sequence available in the public domain covering the stroke gene region. Therefore, we sequenced approximately 3 Mb of the area defined by one drop in lod. The locus on 5q12 indicated in the genome wide scan was physically mapped using bacterial artificial chromosomes (BACs). A set of overlapping clones for a 20 cM region was assembled through a combination of hybridization and BAC-fingerprint walking. The BACs (bacterial artificial clones) covering the minimum tiling path of the one LOD interval were analysed using shotgun cloning and sequencing. Dye terminator (ABI PRISM BigDye) chemistry was used for fluorescent automated DNA sequencing. ABI prism 377 sequences were used to collect data and the Phred/Phrap/Consed software package in combination with the Polyphred software were used to assemble sequences. See Table 9A. We also used publicly available BAC sequences from GenBank listed in Table 9B for the assembly. The BAC clones we sequenced are from the RCPI-11 Human BAC library (Pieter deJong, Roswell Park). The vector used was pBACe3.6. The clones were picked into a 94 well microtiter plate containing LB/chloramphenicol (25 μg/ml)/glycerol (7.5%) and stored at −80° C. after a single colony has been positively identified through sequencing. The clones can then be streaked out on a LB agar plate with the appropriate antibiotic, chloramphenicol (25 μg/ml)/sucrose (5%).

TABLE 9A

| Sequenced at Decode | | |
|---|---|---|
| (BAC name) | Comment | Accession number |
| RP11-621C19 | 1 | AC020733 |
| RP11-113C1 | 2 | |
| RP11-412M9 | 2 | |
| RP11-151G2 | 2 | |
| RP11-151F7 | 2 | |
| RP11-281M3 | 2 | |
| RP11-421L6 | 2 | |
| RP11-68E13 | 2 | |
| RP11-379P8 | 2 | |
| RP11-1A7 | 1 | AC008111 |
| RP11-422K3 | 2 | |

Key to “Comment” column:
1 = This BAC has a publicly available sequence, it was sequenced at Decode to make sure the sequence was correct
2 = Only BAC end-sequence available for this BAC publicly.

[0251] TABLE 9B

| Sequences available from | | |
|---|---|---|
| GenBank (BAC name) | Accession number | Status of sequence |
| RP11-621C19 | AC020733 | 17 unordered pieces |
| CTD-2003D5 | AC016591 | complete sequence |
| CTD-2210C1 | AC008879 | 7 unordered pieces |
| CTD-2124H11 | AC008818 | complete sequence |
| CTD-2301A11 | AC008934 | complete sequence |
| RP11-16B11 | AC011929 | 7 unordered pieces |
| CTC-261E10 | AC026693 | complete sequence |
| CTD-2027G10 | AC027322 | complete sequence |
| RP11-1A7 | AC008111 | 8 unordered pieces |
| CTD-2122K7 | AC012315 | complete sequence |
| CTD-2085F10 | AC008804 | complete sequence |
| CTD-2040J22 | AC008791 | complete sequence |
| RP11-235N16 | AC020975 | 16 ordered pieces |
| CTD-2146O16 | AC008833 | complete sequence |
| CTD-2084I4 | AC022125 | 17 ordered pieces |
| CTD-2140K22 | AC008829 | 26 ordered pieces |
| CTD-2124D11 | AC020924 | 7 ordered pieces |
| RP11-731H6 | AC026095 | 21 unordered pieces |

[0252] PDE4D Gene; Identification of New Exons and Splice Variants

[0253] The gene, human cAMP specific phosphodiesterase 4D (HPDE4D) was identified in the sequenced region by BLAST of our novel genomic sequence with the cDNAs/EST databases from GenBank. In addition, we ran RT-PCR reactions and 5 prime and 3 prime RACE reactions using cDNA libraries generated from a variety of tissues including human aorta. The primer sites used corresponded to known or exons predicted from our genomic sequence using Genscan, and Fgene. We found several novel cDNAs and matched them to the 3 Mb sequence in and around PDE4D. The genomic sequence covering all known and novel exons in PDE4D so far is approximately 1,691,140 bases in length.

[0254] We defined new alternative transcripts (Supplementary Information C) which together with previously known transcripts showed that the PDE4D gene contains 22 exons over at least 1.5 Mb and overlaps with the PART1 gene whose transcript is on the other strand at the 5′ end. The PDE4D gene has at least 7 promoters and encodes 8 protein isoforms. All isoforms have an identical C-terminal catalytic domain but differ at the N-terminal regulatory domain. Six of the 8 forms are so called long isoforms. Each of them have unique N-terminal regulatory domains but they are all characterized by two highly conserved regions found in all PDE4 subfamilies, i.e. upstream conserved regions 1 and 2 (UCR 1 and 2). The six long forms differ from each other by unique alternative 5 prime exons which predicts six alternative promoters that are each upstream of the corresponding 5 prime exon. The remaining two are the so-called short forms, variants which lack the UCR 1 (Houslay, M. D. & Adams, D. R., Biochem J, 370, 1-18 (2003)). The five previously known isoforms are encoded by 17 exons distributed over a segment of 0.9 Mb.

[0255] Five new 5′ exons extending the gene by 0.59 Mb have been identified. One 5 exon, that we named D8, was identified by matching two ESTs in the public databases (AU127104 and AL598089) and then verified by RT-PCR. Four exons, named D7A-1, D7A-2, D7A-3 and D9, were identified by RLM-RACE (RNA ligase-mediated and oligo-capping rapid amplification of cDNA ends) of the SKNAS neuroblastoma cell line and the HELA cell line. Total RNA was isolated from HeLa, SkNAs and Jurkat 77 cell cultures according to manual, using the TRIZOL® reagent provided by GibcoBRL. We used the GeneRacer™, ThermoZyme™ and TOPO TA cloning (containing pCR®2.1-TOPO®) kits from Invitrogen following the manufacturer's protocol. The gene specific reverse (3′) primer was designed for PDE4D exon LF1(5′ GGCAATGGAGGAGTTCCGGGACA TA-3′; SEQ ID NO: 87 origin from Homo sapiens). The three exons D7A-1, D7A-2 and D7A-3 are spliced to one another and together splice onto exon LF1 forming the splice variant we named PDE4D7A (FIG. 3). Exons D8 and D9 are spliced by themselves onto exon LF1 forming two splice variants we named PDE4D8 and PDE4D9, respectively (FIG. 3).

[0256] In terms of genomic structure, the D7A exon extends the 5′ end of PDE4D by 590,000 bp, and the D8 and D9 exons lie between exons D3 and LF1. The new PDE4D7A isoform has an open reading frame extending into LF1, resulting in additional 91 amino acids at the N-terminus of the predicted protein. The D8 and D9 5 ′ exons contain a long 5′ UTR, followed by an ATG near the end of the exons that extends an ORF into LF1 resulting in a novel N-terminal segments of 22 and 30 amino acids in the PDE4D8 and PDE4D9 predicted proteins, respectively. The new splice variants were verified by RT-PCR on different cDNA tissue panels and subsequent cloning and sequencing of the products.

[0257] Three PDE4D isoforms have been submitted to GenBank by Memory Pharmaceuticals on Sep. 16, 2002 and Dec. 17, 2002, under accession numbers AF536975 (isoform named PDE4D6), AF536976 (named PDE4D7) and AF536977 (named PDE4D8). See also PCT WO 01/00851, published Jan. 4, 2001. The sequence AF536977 corresponds to our earlier reported PDE4D6 isoform and AF536976 corresponds partly to our earlier reported PDE4D7 isoform, however the first untranslated exon we named D7-1 is missing from this sequence. The sequence AF536975 is a new short PDE4D isoform. We have therefore changed the isoform names accordingly herein as follows: PDE4D6 is now called PDE4D8, PDE4D7 is now called PDE4D7A and PDE4D8 is now called PDE4D9. We have submitted the new PDE4D splice variants, PDE4D7A and PDE4D9 to GenBank (Accession numbers AY245866 and AY245867, respectively).

[0258] The exon locations are indicated in Table 10 below.

TABLE 10

| Exon | Start | End |
|---|---|---|
| (New) D7A-1 | 142207 | 142328 |
| (New) D7A-2 | 444645 | 444775 |
| (New) D7A-3 | 641649 | 641878 |
| D4 | 736254 | 737226 |
| D5 | 861791 | 862202 |
| D3 | 1044051 | 1044190 |
| (New) D8¹ | 1273404 | 1273709 |
| (New) D9² | 1354347 | 1355128 |
| LF1 | 1414511 | 1414702 |
| LF2 | 1436943 | 1436979 |
| LF3 | 1472965 | 1473235 |
| LF4 | 1449835 | 1449542 |
| N3 | 1539259 | 1539302 |
| 4D1/D2 | 1591172 | 1591425 |
| ex3 | 1636944 | 1637037 |
| ex4 | 1638406 | 1638578 |
| ex5 | 1639508 | 1639606 |
| ex6 | 1640491 | 1640655 |
| ex7 | 1641818 | 1641917 |
| ex8 | 1653070 | 1653224 |
| ex9 | 1653943 | 1654065 |
| ex10 | 1654576 | 1654758 |
| ex11 | 1655335 | 1655747 |

¹Formerly reported in earlier applications as D6
²Formerly reported in earlier applications as D8

[0259] The markers showing the highest association are located within PDE4D (Table 1, FIG. 3), as follows:

[0260] AC022125-3, 21 000 bp upstream of the LF1 exon

[0261] D5S2000, 37 000 hp downstream of D8 exon

[0262] D5S2091, 30 000 bp downstream of D8 exon

[0263] D17-C, 21 000 bp upstream of D8 exon

[0264] D17-B, 31 000 bp upstream of D8 exon

[0265] AC008833-6, 35 000 bp downstream of D9 exon

[0266] AC008818-1, 3000 bp upstream of D7A-1 exon

[0267] AC008829-5, 89 000 bp upstream of D1/D2 exon

[0268] Microsatellite Haplotype (1) and (2) are located upstream of and stretch over the D8 exon

[0269] Microsatellite Haplotype (3) is located upstream of and stretches over the LF2-LF4 exons

[0270] Microsatellite Haplotype (4) stretches over D8 and D9 exons

[0271] Microsatellite Haplotype (5) stretches over PDE4D7A-1 to PDE4D7A-3 exons

[0272] Microsatellite Haplotype (6) stretches over PDE4D7A-1 exon

[0273] Microsatellite Haplotype (7) stretches over LF2-exon 11

[0274] A contig for the incomplete genomic sequence of the PDE4D gene was submitted by others in November 2000 (GenBank entry NT_{—}023193 by International Human Genome Project collaborators). The size of the contig is 614 481 bp (including gaps) whereas our novel genomic sequence for the whole PDE4D region (i.e., from the first exon for PDE4D variant) is close to 1,690,000 bp and contains no gaps. The contig NT_{—}023193 comprises only 11 exons of the PDE4D gene (in FIG. 3, exons 4D1/D2-11) and the 5′ differently spliced exons are missing in the contig (in FIG. 3, exons D4, D5, D3, D8, D9, D7A-1, D7A-2, D7A-3, LF1, LF2, LF3 and LF4).

TABLE 11
Publically Available SNPS; SNP ID No. from NCBI Database

| | | | | | |
|---|---|---|---|---|---|
| rs286155 | rs187481 | rs35385 | rs1423471 | rs27223 | rs440607 |
| rs286156 | rs153152 | rs40512 | rs27224 | rs27222 | rs411255 |
| rs2061250 | rs27960 | rs35386 | rs1645013 | rs251726 | rs615429 |
| rs286150 | rs27564 | rs35387 | rs1423472 | rs1862589 | rs789396 |
| rs206789 | rs27565 | rs27221 | rs27220 | rs702556 | rs37684 |
| rs1823062 | rs26948 | rs27653 | rs1423473 | rs702554 | rs1445893 |
| rs1823063 | rs40131 | rs26955 | rs149079 | rs441391 | rs37685 |
| rs1445852 | rs26949 | rs26956 | rs149324 | rs446883 | rs1086121 |
| rs766119 | rs26950 | rs153031 | rs153067 | rs789615 | rs42222 |
| rs956721 | rs26954 | rs185190 | rs40354 | rs401207 | rs37707 |
| rs248910 | rs26953 | rs37762 | rs26951 | rs364917 | rs37708 |
| rs248912 | rs152324 | rs37761 | rs153029 | rs404202 | rs37709 |
| rs789389 | rs851284 | rs1435083 | rs159620 | rs256353 | rs2164660 |
| rs1423247 | rs1396476 | rs991551 | rs1501641 | rs986400 | rs298100 |
| rs874768 | rs1508860 | rs1154790 | rs159619 | rs1504981 | rs298098 |
| rs2042315 | rs1974850 | rs1154789 | rs159614 | rs1120533 | rs298096 |
| rs918590 | rs2136203 | rs714291 | rs159613 | rs256351 | rs298095 |
| rs918591 | rs2174994 | rs981760 | rs159612 | rs190458 | rs298094 |
| rs918592 | rs1508863 | rs1369288 | rs159611 | rs256352 | rs298093 |
| rs1115372 | rs1508859 | rs977418 | rs194368 | rs171745 | rs1362942 |
| rs1345782 | rs1508864 | rs977417 | rs661576 | rs1157709 | rs1362941 |
| rs1363862 | rs1396474 | rs977416 | rs299627 | rs1910790 | rs298091 |
| rs1423248 | rs1543951 | rs1529843 | rs159608 | rs1910789 | rs298090 |
| rs1423246 | rs2016324 | rs1529842 | rs159609 | rs1504985 | rs298089 |
| rs1862614 | rs1995780 | rs1435077 | rs159624 | rs1008709 | rs298088 |
| rs2194256 | rs1508865 | rs1369287 | rs1159470 | rs1027747 | rs298087 |
| rs889305 | rs952110 | rs1017410 | rs159622 | rs869685 | rs1421401 |
| rs2113071 | rs1533019 | rs1017409 | rs256349 | rs869686 | rs298086 |
| rs2113072 | rs2117552 | rs1435076 | rs256348 | rs924880 | rs298085 |
| rs966220 | rs1545069 | rs1435075 | rs1501640 | rs1504983 | rs298084 |
| rs966221 | rs1545070 | rs1435074 | rs600611 | rs1504982 | rs298083 |
| rs719702 | rs973700 | rs978455 | rs159621 | rs877745 | rs298073 |
| rs2113073 | rs1583434 | rs1827340 | rs159625 | rs877744 | rs298072 |
| rs2113074 | rs1347401 | rs1393083 | rs1435072 | rs2164661 | rs298071 |
| rs2113075 | rs1949017 | rs988364 | rs173945 | rs981230 | rs1421400 |
| rs1035512 | rs723962 | rs1017408 | rs256356 | rs1437124 | rs402874 |
| rs1559277 | rs1355099 | rs2053155 | rs185351 | rs746477 | rs434368 |
| rs1981848 | rs1396473 | rs181923 | rs256355 | rs893191 | rs371011 |
| rs1544788 | rs1369285 | rs1546364 | rs2067024 | rs1992112 | rs298063 |
| rs1544790 | rs1435071 | rs173942 | rs256354 | rs298102 | rs298062 |
| rs1544791 | rs1435070 | rs159616 | rs173944 | rs298101 | rs298061 |
| rs298060 | rs298046 | rs295959 | rs294500 | rs1506560 | rs458953 |
| rs298057 | rs298048 | rs295958 | rs294501 | rs37569 | rs174039 |
| rs298056 | rs298049 | rs296410 | rs294503 | rs291119 | rs2174624 |
| rs1370230 | rs298050 | rs295957 | rs295936 | rs37571 | rs2135480 |
| rs297975 | rs298051 | rs295956 | rs1395336 | rs1870077 | rs992726 |
| rs297974 | rs298052 | rs295955 | rs1395337 | rs159195 | rs294474 |
| rs379578 | rs298053 | rs295954 | rs294492 | rs37572 | rs294475 |
| rs920190 | rs190936 | rs295949 | rs159196 | rs37573 | rs988827 |
| rs1865962 | rs298017 | rs295980 | rs159197 | rs167161 | rs988828 |
| rs298018 | rs298016 | rs295979 | rs172362 | rs37574 | rs1350297 |
| rs298021 | rs298015 | rs295978 | rs37579 | rs1506562 | rs1457110 |
| rs298022 | rs298014 | rs1154587 | rs721784 | rs291122 | rs1457111 |
| rs298023 | rs2053229 | rs296406 | rs697076 | rs37575 | rs1824154 |
| rs298024 | rs295974 | rs296405 | rs294478 | rs37576 | rs2112911 |
| rs298025 | rs295973 | rs295948 | rs953302 | rs1876209 | rs1551564 |
| rs298026 | rs295972 | rs295947 | rs294479 | rs190486 | rs2034895 |
| rs298027 | rs295971 | rs295946 | rs697075 | rs447261 | rs2081092 |
| rs298028 | rs295970 | rs295945 | rs294481 | rs1506558 | rs2112910 |
| rs298029 | rs295969 | rs295944 | rs294482 | rs1108916 | rs918583 |
| rs298030 | rs295968 | rs1395334 | rs294483 | rs921942 | rs1840838 |
| rs169868 | rs295966 | rs295943 | rs702545 | rs924998 | rs1350298 |
| rs177077 | rs726652 | rs1035321 | rs294484 | rs176705 | rs1990985 |
| rs298032 | rs295965 | rs294494 | rs294485 | rs1156029 | rs1379297 |
| rs298033 | rs1307218 | rs722923 | rs294486 | rs1156028 | rs1817248 |
| rs298034 | rs1307217 | rs294495 | rs702544 | rs931857 | rs244569 |
| rs298035 | rs893190 | rs294496 | rs702543 | rs931856 | rs244568 |
| rs298042 | rs1111495 | rs294497 | rs159194 | rs931855 | rs244567 |
| rs298044 | rs295961 | rs294498 | rs40215 | rs1506557 | rs244565 |
| rs298045 | rs295960 | rs294499 | rs291118 | rs462930 | rs185417 |
| rs258128 | rs378970 | rs244590 | rs35281 | rs1824159 | rs545611 |
| rs258127 | rs401013 | rs181736 | rs35280 | rs27170 | rs649476 |
| rs258125 | rs427748 | rs193447 | rs35279 | rs27169 | rs1664896 |
| rs1348710 | rs427740 | rs2028842 | rs35278 | rs27168 | rs149106 |
| rs1348709 | rs378869 | rs2028841 | rs40126 | rs2013979 | rs1374028 |
| rs1971061 | rs1902609 | rs1823068 | rs35277 | rs889231 | rs531105 |
| rs1541673 | rs389324 | rs1823067 | rs35276 | rs2014012 | rs27184 |
| rs1541672 | rs387647 | rs1823066 | rs35275 | rs37353 | rs1445951 |
| rs258112 | rs377451 | rs244588 | rs40125 | rs187645 | rs1947090 |
| rs258111 | rs403695 | rs168641 | rs35274 | rs1809012 | rs26708 |
| rs171800 | rs403672 | rs2059175 | rs244577 | rs187644 | rs2112959 |
| rs187716 | rs372309 | rs2059174 | rs35267 | rs153981 | rs1445953 |
| rs258110 | rs424839 | rs1118965 | rs35266 | rs255652 | rs26709 |
| rs258109 | rs370891 | rs154028 | rs39672 | rs255650 | rs26710 |
| rs258108 | rs434183 | rs151802 | rs958851 | rs255649 | rs28055 |
| rs258107 | rs444552 | rs244580 | rs244576 | rs2194210 | rs26711 |
| rs665836 | rs433565 | rs1457145 | rs244575 | rs255648 | rs27723 |
| rs392901 | rs1445918 | rs244579 | rs244573 | rs255647 | rs27185 |
| rs383444 | rs441817 | rs255812 | rs35258 | rs154221 | rs27695 |
| rs662643 | rs433161 | rs154029 | rs35259 | rs256752 | rs1445954 |
| rs670169 | rs428059 | rs185333 | rs40121 | rs256120 | rs27549 |
| rs525099 | rs434422 | rs35289 | rs35261 | rs255635 | rs455969 |
| rs669240 | rs427433 | rs35288 | rs35264 | rs185325 | rs26712 |
| rs381755 | rs391377 | rs35287 | rs40122 | rs26686 | rs1867711 |
| rs454702 | rs414746 | rs35286 | rs35265 | rs1031197 | rs1867712 |
| rs443191 | rs187368 | rs35285 | rs35255 | rs1031198 | rs26713 |
| rs380118 | rs244593 | rs35284 | rs721826 | rs27183 | rs26714 |
| rs2168649 | rs244592 | rs35283 | rs244570 | rs28044 | rs27547 |
| rs371775 | rs244591 | rs35282 | rs27171 | rs27182 | rs26715 |
| rs27949 | rs153968 | rs745813 | rs1363882 | rs2055295 | |
| rs26700 | rs464787 | rs889229 | rs1353749 | rs1391648 | |
| rs1306348 | rs153978 | rs1077978 | rs1391651 | rs2055298 | |
| rs35309 | rs464311 | rs2081106 | rs1391650 | rs1472456 | |
| rs27691 | rs149108 | rs1559252 | rs1391649 | rs1553114 | |
| rs35310 | rs153980 | rs2054443 | rs1391652 | rs1542842 | |
| rs26689 | rs153961 | rs922437 | rs950446 | rs1498611 | |
| rs27187 | rs1867725 | rs922436 | rs950447 | rs1532520 | |
| rs1445948 | rs153965 | rs922435 | rs1498599 | | |
| rs26687 | rs153966 | rs922434 | rs1498601 | | |
| rs166260 | rs1988803 | rs716908 | rs1498609 | | |
| rs149506 | rs467300 | rs1971940 | rs1498608 | | |
| rs27722 | rs1664886 | rs1559251 | rs1553113 | | |
| rs26695 | rs1867724 | rs1345791 | rs1353748 | | |
| rs27773 | rs1445947 | rs1345792 | rs1498606 | | |
| rs1471429 | rs42470 | rs1345793 | rs1353747 | | |
| rs1471430 | rs1423308 | rs1105577 | rs1006431 | | |
| rs26705 | rs27174 | rs1960 | rs1948651 | | |
| rs28054 | rs168834 | rs1824788 | rs1498605 | | |
| rs26703 | rs27727 | rs1862563 | rs1498604 | | |
| rs27898 | rs27172 | rs1551939 | rs1498603 | | |
| rs722010 | rs676449 | rs1038080 | rs1995166 | | |
| rs27957 | rs27186 | rs997421 | rs1498602 | | |
| rs26702 | rs2112957 | rs1014317 | rs1077183 | | |
| rs27548 | rs1023814 | rs2059191 | rs1078368 | | |
| rs26701 | rs27175 | rs1551938 | rs1874857 | | |
| rs27188 | rs1445950 | rs1186170 | rs1874858 | | |
| rs27189 | rs2021384 | rs986067 | rs1909294 | | |
| rs149084 | rs736736 | rs954740 | rs1546221 | | |

[0275] TABLE 12
New SNPs identified by deCODE

| Position in patent | Variation | AA Change | Exon |
|---|---|---|---|
| 135641 | T/A | | |
| 142780 | A/G | | |
| 732790 | G/T | | |
| 735966 | C/A | | |
| 736226 | A/G | | |
| 736516 | C/T | | |
| 850001 | G/A | | |
| 852776 | A/C | | |
| 853079 | G/T | | |
| 853575 | C/A | | |
| 856468 | A/G | | |
| 860845 | A/G | | |
| 870924 | A/G | | |
| 1027267 | T/C | | |
| 1027643 | T/G | | |
| 1027757 | T/C | | |
| 1028146 | T/A | | |
| 1037657 | A/C | | |
| 1044016 | G/A | | |
| 1044045 | C/T | | |
| 1254737 | T/C | | |
| 1254849 | T/C | | |
| 1255763 | G/T | | |
| 1257206 | A/G | | |
| 1258161 | T/C | | |
| 1268007 | A/G | | |
| 1268187 | C/T | | |
| 1268553 | A/G | | |
| 1272669 | G/A | | |
| 1272910 | A/G | | |
| 1273023 | G/A | | |
| 1273220 | A/G | | |
| 1273240 | A/G | | |
| 1273543 | C/T | | |
| 1288439 | G/A | | |
| 1289730 | T/A | | |
| 1290176 | G/A | | |
| 1293745 | T/C | | |
| 1344605 | A/G | | |
| 1344864 | G/A | | |
| 1345135 | C/G | | |
| 1345286 | A/G | | |
| 1346112 | C/T | | |
| 1352976 | A/T | | |
| 1354291 | T/C | | |
| 1354377 | C/T | | |
| 1354554 | C/A | | |
| 1354675 | T/C | | |
| 1355114 | T/C | | |
| 1355693 | A/G | | |
| 1357081 | A/G | | |
| 1362985 | T/G | | |
| 1363021 | C/T | | |
| 1363827 | C/T | | |
| 1363911 | G/A | | |
| 1364061 | C/T | | |
| 1364066 | T/A | | |
| 1367904 | A/G | | |
| 1368193 | T/C | | |
| 1368217 | G/C | | |
| 1373349 | C/T | | |
| 1373384 | A/G | | |
| 1373415 | T/C | | |
| 1373979 | T/G | | |
| 1376149 | G/A | | |
| 1384931 | A/C | | |
| 1385093 | A/T | | |
| 1385107 | G/A | | |
| 1385445 | T/C | | |
| 1391418 | G/C | | |
| 1409210 | C/A | | |
| 1414804 | C/T | | |
| 1428284 | T/C | | |
| 1431800 | A/T | | |
| 1449904 | A/T | | |
| 1574301 | C/G | | |
| 1574615 | C/T | | |
| 1575634 | A/T | | |
| 1580088 | G/A | | |
| 1581078 | G/A | | |
| 1582418 | T/A | | |
| 1584580 | A/C | | |
| 1585955 | G/T | | |
| 1590608 | T/C | | |
| 1590672 | A/G | | |
| 1590673 | G/T | | |
| 1590837 | G/A | | |
| 1590936 | C/A | | |
| 1591011 | G/A | | |
| 1591047 | C/T | | |
| 1591306 | C/A | Pro −> Thr | D1 |
| 1591583 | T/C | | |
| 1594788 | C/A | | |
| 1594994 | G/A | | |
| 1601831 | C/T | | |
| 1636902 | T/C | | |
| 1638550 | A/C | Lys −> Thr | exon 4 |
| 1640663 | T/C | | |
| 1641954 | C/T | | |
| 1641960 | C/T | | |
| 1653881 | G/A | | |
| 1655748 | G/A | | |
| 91470 | G/A | | |

[0276] TABLE 13
New Isoforms

| Isoform | | | | |
|---|---|---|---|---|
| Name | Exon | | Size | Cell line |
| PDE4D7 | D7-1 | 5′ | 122 bp | SKNAS |
| PDE4D7 | D7-2 | Internal | 131 bp | SKNAS |
| PDE4D7 | D7-3 | Internal | 230 bp | SKNAS |
| PDE4D9¹ | D9 | 5′ | 782 bp | HeLa |

¹Formerly referred to in previous applications as PDE4D8

[0277] The sequences are as follows:

D7A-1:

(SEQ ID NO:11; includes D7A-1, D7A-2 and D7A-3)

ATAGTTGGCGTACCCTGAGGCCTGCCAGTTCCTGCCTTAATGCATATGTA
GTCGTAATTGAGTTCTGACACGGCCTTGGATGTTTCTGTCCTAAATAGCT
GACATTGCATCTTCAAGACTGT
D7A-2:
CATTCCAGTTGGCTTTTGAGTGGATACGTGCAGTGAGATCATTGACACTG
GAAACACTAGTTCCCATTTTAATTACTTAAAACACCACGATGAAAAGAAA
TACCTGTGATTTGCTTTCTCGGAGCAAAAGT
D7A-3:
GCCTCTGAGGAAACACTACATTCCAGTAATGAAGAGGAAGACCCTTTCCG
CGGAATGGAACCCTATCTTGTCCGGAGACTTTCATGTCGCAATATTCAGC
TTCCCCCTCTCGCCTTCAGACAGTTGGAACAAGCTGACTTGAAAAGTGAA
TCAGAGAACATTCAACGACCAACCAGCCTCCCCCTGAAGATTCTGCCGCT
GATTGCTATCACTTCTGCAGAATCCAGTGG

[0278] New predicted amino-terminal protein sequence from above (PDE4D7A):

| | |
|---|---|
| MKRNTCDLLSRSKSASEETLHSSNEEEDPFRGMEPYLVRRLSCRNIQLPPLAFRQ | (SEQ ID NO:12) |
| LEQADLKSESENIQRPTSLPLKILPLIAITSAESS (90 amino acids) | |
| D9: | |
| TTCTCACTGCCCTGCGGTGTTTTGAACTGCCTTCTTACAGACGTCATACAGCC | (SEQ ID NO:13) |
| CTTGAGGAATAGTTTCTGCCTGGTGAGATTGAATGATAGTTCTCATTCACAA | |
| AACCCTGGATTCTAAGCAGGGACACACAGAAATTACTTTCGCAGGTAAATC | |
| AGCCCACCCAGCCAAAGTGTGGAGAGATTTGTTCCTTGGCTGACTTCTTTGC | |
| TCCACGGAGAGGAGTGTTTTCCTGTGCTTGCCCTGAAATGGAACTTCCTTGA | |
| CAGCTCTCCCGTGTTACAGTACCTCCCGGTCATTTTCTTTTTCTCTCTCTCTAC | |
| CTGCGCTCTTCGAGTGTCAGAAACCTTTAAAGCTGTTACTATGGAATTGCAA | |
| AAAAGAGATCAAGTGACTCTTTCACTATGCTGGTTTCCCTTGTGACCCAGAT | |
| GAAGAATCAATTCAGAATTCAGTTCCTCCCTTGGCATTGCAAGACACAGAAG | |
| AAACTGTCACTTCCTAACAGCCTAGTACTGGAGTAAATTCAGTATGAAGGAA | |
| GAAGCGCTCCTGCGTGTTAGAACCTTGCCCATGAGCTGGACCGAGGACAG | |
| GAGATGGACTCCAGGAAAATTGGATTTCTTCAAGCAGCCTCCCTTGGAAATG | |
| GAATATCTTTAAAATCTTCTTTGCAGAAAGACAGTTAGAATGTATTAATCAG | |
| AATAGTTGAAGACTTATTTTCCTTTTTATTTTTTTTCAAAATGAGCATTATTAT | |
| GAAGCCAAGATCCCGATCTACAAGTTCCCTAAGGACTGCAGAGGCAGTTTG | |

[0279] New predicted amino-terminal protein sequence from above (PDE4D9):

[0280] MSIIMKPRSRSTSSLRTAEAV (21 amino acids) (SEQ ID NO: 14).

[0281] Discussion of Example 2:

[0282] Here we present the first complete genomic sequence of human PDE4D, two novel mRNA/protein isoforms of PDE4D and their corresponding exons, and the intron-exon structure of known and novel isoforms. The basis for phosphodiesterases is the mammalian homolog of the “dunce” gene in Drosophila melanogaster, implicated in learning and memory (Davis, R. L. and B. Dauwalder, Trends Genet., 7(7):224-229 (1991)). PDEs are members of a large superfamily of isoenzymes subdivided into 9 and possibly 10 distinct families (Conti, M. and S. L. Jin, Prog. Nucleic Acid Res. Mol. Biol., 63:1-38 (1999)), with several genes in each family and more than one isoform for each gene. The significance of the diversity of PDEs is not known but many of the isoforms differ in their biochemical properties, phosphorylation, intracellular targeting, protein-protein interactions and patterns of expression in tissues, which suggests that each of the various isoforms might have distinct functions (Bolger, G. B., Cell Signal, 6(8):851-859 (1994); Conti, M., et al., Endocr. Rev., 16(3):370-378 (1995)).

[0283] There are four genes that encode the type 5 PDEs (PDE4A, PDE4B, PDE4C and PDE4D), which is a group of enzymes characterized by high affinity for cAMP. The gene for PDE4D was assigned to human chromosome 5q12 (Milatovich, A., et al., Somat. Cell Mol. Genet., 20(2):75-86 (1994); Szpirer, C., et al., Cytogenet. Cell Genet., 69(1-2):22-14 (1995)) and 5 distinct splice variants have been characterized (the short forms PDE4D1, PDE4D2 and the long forms PDE4D3, PDE4D4, and PDE4D5) (Bolger, G. B., et al., Biochem. J., 328(Pt.2):539-548 (1997)) (FIG. 3). The sequence of the human PDE4D variants show a high degree of homology to the PDE4Ds expressed in mouse and rat. The pattern of splicing and different promoter usage is highly conserved during evolution indicating an important physiological role (Nemoz, G., et al., FEBS Lett., 384(1):97-102 (1996)). The PDE4D variants are generated at two major boundaries present in the gene. The first boundary corresponds to the junction of exon 2. Differential splicing in this region generates the 2 short variants PDE4D1 (586 a.a.) and PDE4D2 (508 a.a.) (FIG. 3). This splicing boundary is conserved in mouse, rat and between different human PDE4 genes. The splicing variant PDE4D2 is generated by the removal of 256 bp from the PDE4D1 sequence. The initiation codon in the PDE4D2 variant lies within exon D1/D2. Data demonstrates that the expression of the short PDE4D variants is under the control of an internal promoter regulated by cAMP (Vicini, E. and M. Conti, Mol. Endocrinol., 11(7):839-850 (1997)). The second major splicing boundary is also conserved during evolution and is identical to that described in the Drosophila dunce gene. Splicing occurs at the intron/exon boundary at the LF1 exon (FIG. 3).

[0284] PDE Function

[0285] The PDEs serve at least four major functions in the cell. They can (1) act as effector of signal transduction by interacting with receptors and G-proteins; (2) integrate the cyclic nucleotide-dependent pathway with other signal transduction pathways; (3) function as homeostatic regulators, playing a role in feedback mechanisms controlling cyclic nucleotide levels during hormone and neurotransmitter stimulation; (4) play an important role in controlling the diffusion of cyclic nucleotides and in creating subcellular domains or channeling cyclic nucleotide signaling (Conti, M. and S. L. Jin, Prog. Nucleic Acid Res. Mol. Biol., 63:1-38.(1999)). Inhibition of PDE has long been recognized as an effective pharmacological strategy to alter intracellular cyclic nucleotide levels (Flamm, E. S., et al., Arch. Neurol., 32(8):569-71 (1975)).

[0286] It has been reported that PDE4 is the predominant isozyme regulating vascular tone mediated by cAMP hydrolysis in cerebral vessels (Willette, R. N., et al, J. Cereb. Blood Flow Metab., 17(2):210-9 (1997)).

[0287] A recent study on mice with targeted disruption of PDE4D gene (Hansen, G., et al., Proc. Natl. Acad. Sci. USA, 97(12):6751-6 (2000)) has demonstrated a crucial role of PDE4D in the control of smooth muscle contraction and muscarinic cholinergic receptor signaling but not in the control of airway inflammation. The lung phenotype of the PDE4D−/− mice demonstrates that this gene plays a nonredundant role in cAMP homeostasis. There is a significant reduction in PDE activity and an increase in resting and stimulated cAMP levels in the lung, indicating that other PDE4s (or other PDEs) are not up-regulated and cannot compensate for the loss of PDE4D. These findings support that PDE4D serves a unique, nonoverlapping functions in cell signalling.

[0288] No clear link between an established inherited disorder and known PDE loci has emerged, with the exception of PDE6. Inhibitors of PDEs have been shown to affect airway responsiveness and pulmonary allergic inflammation (Schudt, C., et al., Pulm. Pharmacol. Ther., 12(2):123-9 (1999)). There are reports suggesting that altered PDE4 function may be linked to nephrogenic diabetes insipidus (Takeda, S., et al., Endocrinology, 129(1):287-94 (1991)) or atopic dermatitis (Chan, S. C., et al., J. Allergy Clin. Immunol., 91(6):1179-88 (1993)), however no mutations have been identified. It has also been reported that vasorelaxation modulated by PDE4 (not mentioned whether it is A, B, C or D gene family) is compromised in chronic cerebral vasospasm associated with subarachnoid hemorrhage (Willette, R. N., et al., J. Cereb. Blood Flow Metab., 17(2):210-9 (1997)). PDE4D itself has not been linked to stroke before.

[0289] PDE4D Expression and Cellular Localization

[0290] PDE4Ds are expressed in human peripheral mononuclear cells (Nemoz, G., et al., FEBS Lett, 384(1):97-102 (1996)), brain (Bolger, G., et al., Mol. Cell Biol., 13(10):6558-71 (1993)), heart (Kostic, M. M., et al., J. Mol. Cell Cardiol, 29(11):3135-46 (1997)) and vascular smooth muscle cells (Liu, H. and D. H. Maurice, J. Biol. Chem., 274(15):10557-65 (1999)).

[0291] Immunoblotting of rat brain has shown that the PDE4D3, PDE4D4 and PDE4D5 proteins are present in brain (Bolger, G. B., et al., Biochem. J., 328(Pt 2):539-48 (1997)) and are expressed in cortex and cerebellum from rat (Iona, S., et al., Mol. Pharmacol., 53(1):23-32 (1998)). These proteins were recovered mostly or exclusively in the particulate fraction suggesting that these forms may be targeted to insoluble cellular structures. In addition a 68 kDa protein was detected which could represent PDE4D1, PDE4D2 or both. To verify this RT-PCR was performed on mRNA from rat brain and the results showed that transcripts for PDE4D 1 and 2 were present. Their data also suggests that the N-terminal regions of the PD E4D3-5, derived from alternatively spliced regions of their mRNAs, are important in determining their subcellular localization activity and differential sensitivity to inhibitors and there are indications that there is a propensity for the long PDE4D isoforms to interact with particulate fraction of the cell.

### Example 3

### PDE4D Isoform Expression

[0292] Expression Analysis in EBV Transformed B Cell Lines

[0293] As a functional mutation in the known coding exons of PDE4D was not identified, gene expression was next studied to determine if the genetic association to stroke relates to regulation of its expression levels. In order to test this, we chose to use cell lines instead of blood or tissues for these studies because expression analysis of cell lines is not confounded by the presence of multiple cell types. Cell types may express PDE4D at different levels so it is generally more reliable to quantify expression in cell lines than tissues. Isoform-specific kinetic PCR analysis was carried out on EBV transformed B cell lines to quantify each isoform in 83 stroke patients and 84 controls. These patients were not selected for this analysis based on any specific subtype of stroke. The majority of the patients had ischemic stroke and 38% of them had carotid or cardiogenic cause of stroke. Overall the total PDE4D message level as assessed by amplification across exons present in all isoforms (PAN), was significantly lower in patients than in controls (p value <0.005). This decrease was due primarily to lower expression of the isoforms, PDE4D 1, PDE4D2 and PDE4D5 (FIG. 4).

[0294] We selected individuals with a specific stroke associated haplotype and compared the expression levels of carrier vs. non-carriers of this haplotype and with patients and controls examined separately (FIGS. 5 and 6). The haplotype was constructed out of the at-risk allele for the microsatellite marker AC008818-1 and SNP5PDM357221 and SNP5PDM361545. This haplotype acts as a surrogate for the disease-associated haplotype we have identified in LD block B (Table 4A). Patients with the haplotype had a significantly decreased expression of the PDE4D7A and PDE4D9 isoforms (FIG. 5). Several other isoforms of PDE4D were expressed but did not show correlation to the disease haplotype. The PDE4D7A correlation was also present in controls but only marginally significant (FIG. 6). Of interest, this at-risk haplotype covers the 5′ exon specific to PDE4D7A and presumably its promoter.

[0295] These results show that there is significant disregulation of the expression of multiple PDE4D isoforms in stroke patients.

[0296] Methodology for Expression Analysis Using Quantitative Reverse Transcriptase PCR

[0297] Total RNA was isolated from EBV transformed B-cell cultures according to manual, using the TRIZOL® reagent provided by GibcoBRL. RNeasy mini Qiagen kit with on column DNA digestion was used to clean RNA. Quality and quantity of RNA was assessed using 2100 Agilent Bioanalyser. cDNA was prepared from total RNA using random hexamers with TaqMan Reverse Transcription Reagents kit from Applied Biosystems (N₈O₈-0234). Primer Express 2.0 and Oligo 6 software were used to make cDNA specific primers and probes for PDE4D and PDE4D isoforms. GAPDH “Assay-On-Demand” was obtained from Applied Biosystems and used as a housekeeping gene. PDE assays were tested and optimized for 384 well high throughput expression analysis using ABI 7900 Instrument. A final concentration of 200 nM probes, 900 nM primers and 2 ng/mcl cDNA was used in a 10 mcl reaction volume. Each plate was run twice and an average for each sample calculated. ABI7900 instrument was used to calculate CT (Threshold Cycle) values. Samples displaying a greater than 1 deltaCT between ACT duplicates were not used in our analysis. Quantity was obtained using the formula 2^{-ΔCT} where ΔCT represents the difference of CT values between target and housekeeping assay.

[0298] Discussion of the Three Examples and Conclusions:

[0299] Our results indicate that genetic variation in the PDE4D gene is associated with ischemic stroke. The direct involvement of PDE4D is strongly supported by both linkage and association. We first identified the association using microsatellite markers, and supplementing the microsatellite data with a denser set of SNPs further supported this. The strongest association is to the two ischemic subtypes, carotid and cardiogenic stroke whereas we did not observe association to small vessel occlusive disease, the form of stroke thought to be independent of atherosclerosis. Although we have not identified a functional mutation in the PDE4D gene, we have identified a haplotype, that extends over the first exon of PDE4D, that is significantly associated to carotid and cardiogenic stroke. This haplotype is present in 47% of the carotid/cardiogenic stroke patients, compared to 21% in the control group with more than two-fold stroke risk for the carriers of this haplotype. It has a population attributed risk of 25%.

[0300] The PDE4D gene is a highly complex gene. By alternative splicing and use of different promoters this gene generates at least 8 different isoforms that yield functional proteins, differing from each other in their N-terminal regions. We have identified four new exons encoding the N-termini of two new isoforms PDE4D7A and PDE4D9. The disease-associated haplotype extends over the 5′exon unique to the new PDE4D7A variant and the presumed promoter region of this isoform suggesting that the functional variation may be involved in transcriptional regulation. This hypothesis is also supported by our PDE4D expression analysis that shows that there is significant correlation between the disease associated haplotype and the level of PDE4D7A message.

[0301] The strongest association found for this PDE4D haplotype was to the two major subtypes of ischemic stroke, carotid and cardiogenic stroke, suggesting a role for this gene in the vascular biology of atherosclerosis. While there are multiple etiologies for ischemic stroke, atherosclerosis remains the most important one and it is the major pathological process for the two ischemic subtypes, carotid and cardiogenic strokes. First, it is the major cause of stenotic and occlusive lesions of the internal and common carotids that lead to carotid strokes. Second, cardiac thrombi which shed emboli to the brain most commonly occur on the background of coronary artery disease, such as following acute myocardial infarction or ischemic cardiomyopathy, and/or due to atrial fibrillation on the basis of poor compliance of ischemic ventricles (diastolic dysfunction/stiffening). Although atrial fibrillation may occur on the background of other diseases such as valvular disease, hyperthyroidism, and hypertension, in the age group that tends to suffer from stroke, ischemic heart disease remains one of the most important causes. Ischemic stroke resulting from occlusion of small penetrating arteries within the brain (small vessel occlusive disease or lacunar stroke) is generally thought to result from endothelial proliferation since atherosclerosis only occurs in larger arteries. PDE4D does not show association to small vessel stroke, consistent with its role in atherosclerosis. Carotid and cardiogenic stroke together account for the majority of ischemic stroke (note that our number for carotid is lower since we used a more stringent cutoff of stenosis).

[0302] PDE4D selectively degrades second messenger cAMP (Kong, A. et al., Nat Genet 10, 10 (2002)), which plays a central role in signal transduction and regulation of physiological responses. It is expressed in most cell types important to the pathogenesis of atherosclerosis, including vascular smooth muscle cells (VSCM), endothelial cells, monocytes, macrophages and T-lymphocytes (Houslay, M. D. and Adams, D. R., Biochem J 370, 1-18 (2003); Liu, H. and Maurice, D. H., J Biol Chem 274, 10557-65. (1999); Liu, H. et al., J Biol Chem 275, 26615-24. (2000); Baillie, G., et al., Mol Pharmacol 60, 1100-11. (2001); Jin, S. L. and Conti, M., Proc Natl Acad Sci USA 99, 7628-33. (2002)). Cyclic AMP is a key signalling-molecule in these cells (Landells, L. J. et al., Br J Pharmacol 133, 722-9 (2001); Fukumoto, S. et al., Circ Res 85, 985-91. (1999); Ogawa, S. et l., Am J Physiol 262, C546-54 (1992)). In VSMC low cAMP levels lead to an increase in proliferation and migration that at least in part is mediated by PDE4 (Landells, L. J. et al., Br J Pharmacol 133, 722-9 (2001); Stelzner, T. J., et al., J Cell Physiol 139, 157-66 (1989); Pan, X., et al., Biochem Pharmacol 48, 827-35. (1994)). Animal models have also shown that elevation of cAMP reduces neointimal lesion formation and inhibits proliferation of SMCs after arterial injury (Palmer, D., et al., Circ Res 82, 852-61. (1998); Indolfi, C. et al., Nat Med 3, 775-9. (1997)). In monocytes and T-lymphocytes, accumulation of cAMP is generally associated with inhibition of immune functions such as proliferation and cytokine secretion (Indolfi, C. et al., J Am Coll Cardiol 36, 288-93. (2000)). It is attractive to postulate that the regulation of cAMP through absolute or relative expression of one or more PDE4D isoforms may differ in individuals susceptible to stroke; some stroke patients may have increased PDE4D activity and, consequently lower cAMP levels in any of the above cell types, leading to development of the atherosclerotic plaque and/or its instability. However, contrary to what one might expect we see decreased expression in some of the PDE4D isoforms in EBV cell lines from stroke patients. It is of interest that these isoforms are all up regulated by cAMP (Liu, H. and Maurice, D. H., J Biol Chem 274, 10557-65. (1999); Tilley, S. L., et al., J Clin Invest 108, 15-23 (2001); Vicini, E. and Conti, M., Mol Endocrinol 11, 839-50 (1997)) suggesting disregulation at the level of cAMP in patients. It is therefore possible that increased activity of one or few splice variants alters the effective PDE4D enzymatic activity of the cell decreasing the cAMP levels thus altering the expression of cAMP regulated isoforms as observed in our expression study. This relative expression of PDE4D isoforms may determine the compartmental localization of PDE4D isoforms and thus the corresponding gradients of intracellular cAMP that have been recently observed (see Housley review).

[0303] In summary, we have presented association analyses (single marker and haplotype analyses) that support the notion that the PDE4D gene confers risk to ischemic stroke. Furthermore, we have observed significant disregulation of multiple PDE4D isoforms in stroke patients. We propose that this gene is involved in the pathogenesis of stroke through atherosclerosis. PDE4D is expressed in cell types important in atherosclerosis and regulates a second messenger with a central role to processes important in the pathogenesis of atherosclerosis. Inhibition of PDE4D in general or specifically one or more isoforms, by a small molecule drug or other pharmacological agent might decrease the risk of stroke in general, and especially those who are predisposed to stroke through variation in the PDE4D gene.

[0304] While this invention has been particularly shown and described with reference to preferred embodiments thereof, it will be understood by those skilled in the art that various changes in form and details may be made therein without departing from the spirit and scope of the invention as defined by the appended claims.

The application's sequence listing, which the Patent Office published only in electronic form, follows.

SEQUENCE LISTING (87 sequences)

SEQ ID NO: 1 - DNA, 1691139 bp, Homo sapiens
cattttttgaaagaacatctgaaagacaaaatggggaatggcgagtctgtctaataaaccattttgagaaaactggatattcatataaagaagtataaagaggactgttatgttgcacaatacacaaaaatcaactcaaaataaattaatgacctaaacttaatatcagaaatgatgaaacttttaaaagaaaacatagggtgaatgtatgtttagggaaactcaaatttatgttcacaggttgcaaaaagaaaaatatgagaaaaacatagaggaaaatgattctgccaataaagtgagttggaaataatttttctgttttcacaaaaatcattgctaacaaaagcaaaaacaagtgtgggactatagaaaactgatgagcttctgcataggaaagaaaagaatgaaccaatacagaaggcatccagtagattgggacaaaattatgggggattatatatctgaaagggttgttatctaacatgtataagaaattaccactactaagtaggaaaaacaacaacacaaaacaacaaataaccagatggaaattgggcaaagaacctgaatagatgtttctgaatagaagacatgaatttgactaccaggtaaaagaaaaggttctcaacatacctaatcatcaagaaaatgtacattaaaactcactgagatatcttctccactctaattggaattaatgttacaaaaaagaaacaaattttttacaatgaaatgatcagtgtggagttggatgaaggggtactattacactactacacagtgtagggtggaatttaagtcagtatacacactatgaaaaatagttggagtttgctcaaaaaataaaatacaactatcatttgctgtagtaatcccaccactgaatatacattttaagaaaatgaaatcagtatattgaagagatacgtgaaatcctacatttcttgacacattattcacagcactcaagatgtggaatcaacctacctgtccaggaacagatgaagagataaagaaaatgcagtgtgtatacacagtggaatgctcttcaccataaaaaattcacggaatcatgtcattgcagcaacatggtggacaatgtaagaaaagctccccggagaagctgtacagaagctgcctcctcagcagtcagggccagggaccggagctgtttttaccccaggacagggccggccccaagtcatcccagagctgccatggcaccccctcagtcgggtcctgaggaatcctacacaagctacttatatcagtgatcactaggataatccatagaacttttgggaaagaagtttaagacctttctcccaccatttcagcaggataaattccaactggattagaaaatgaaatgttaataatgcaaataagtacatatttatatctgtatataaaatacagttgatatttgcctggtgtttaggtgtctaaaggactttctaagcataaaagcaaaaaaaagtcataaaaatgctatagcagtttgagactctatgcaggaaagggcatcatcacgtgcatggatgaatctgtatctaattttaaacaatttccaatggtgcctgtttccttttctttgaaaatctctggagaaatagttcctcttgctgtgtctttctttaggcaagaatttttactaattgatgtgtagtctgaatcctggctaagtataaaccttttattttttatacctgttcttagtgaaaatgaaactgtgactttttttttaattccttttgttggtcaaaaactacaattaactcttctgagtttcttctctggctgaacaaacaatggtcccattggcctttcagggaactccaggccgtctcaaaaaccttcatgtttcatttcttttcagagctcccaaaaagaatagcttgctcttgacgttgtacatgttagtggaatgatcaggactactttgcaaagatgaaaaatttgtgtttctagtgatttgaaaatagaaatctgatgtaactattagatattgggaaagaaggtgacgaaggtaggtatcaccgaaagcacttaacaattctgaataattctgtacttgattgcatttatgtgtatcataggaacagttgggtttccttgagtgttaaattatttattcacttattccacttcaagccagctaaatgattgtttccctgatggcaaaagtctcagattgattgcacagtttatttggttggattgtttatgctctttttattatttattcttatttcaccaatgaaaatatcactaagttctttggtttgttgacctgattgtacctactttgacaaatcactgcctttctggacccagttttctcattaagtggcagtgataacctgtcatacttacagatataaaaacatgaaagttaaagtattgggtaatactttcctcctatcttttttttattttgaaaaagataaaaaattggcataatgtattagttaagatggaataatcatatgttgatatccagccatttcttctctcaaatgataggaagatttttatgtgaaactacttgtgagagatcttaacaatttgtagttagagaaagcactattatatcatttggaaatgcaagaaacaagttacctttggggcaacagaggcccttgtcattttctcaaaagaaggaagcatcagcattttgatgatgatgttgagattgtagaaatgatgaaggtgaaaaagttattctagcttatgtttagcaaaatgaaatgaacccaaataataaaacagttacaacattgaatctctttgggagaaaaaaaaaagatagaatgctaatgtccttcagaacttcttaaaccagaaccttaaaaaaaagagaagcttttaaaaaatcataatagtttatgatcttgaagggtttaaaagtatttgatgaagatgtcttttgaatttatttgtaggtcttcttgtgtatttaaaagctaagttatcttgtaatcatttttttctatacctttgtcagtaacctcttagtgatgaaataaaaaagattaggtaatcatccagcaatggggaagaagttaaggaacaaagagctcagattaaactagtttttagaatctaagcatttctgcatgaatttgaatcatggaaaacaaaatgtagcactccaacatttgatgcaaaactaaaagtggaatactgctttgatatttgaatgaattgaaaaataattaacatccttggaactgtatgtaaagaaggacttcacaagtattatagatacccccaacctcagcccttttcccatgtatctctttgatcacatccctacctcatagatcacccatgtgctgaagactttcagttctgtatcttcattctagatctcctgaactcaagatcagaatatctttctgacttctgactgtgtatttctggatgttatacaagaacctcagctcaaactcagtattccctaaaccattgtttttgaaactttatgttggatgtgaaatctgtattgtagaataacattaaaaaaagaaagaatagtatgcaaaatatcagagtgcattgtatgtagcaagagtaggtattttcgtaaactttttgttttaattaaacacatatatatttattattgcagtgtaaaatgtatttcttaatttggataagtgttagtgaggatgtggataaattggaactcttgtacattactggtgggactataaaatggcactgccgtttggtaaaacagtttggcagttcctcaaaaagttaaacatacagttaacatgtgatatagaaatttcacttttagatgtacacccaaaagaattgagaacatatgttcacacagcaacttgtacacaaatgttcatagcagcattactcagaagagccaaaaagtggaaacaactgaaatgtccatcaagtgatgaagcagtaaaatgtagtatatccgtacaatgaaatattcagccataaaaaggaatgcaatgttgttgcatgctacaacaacttggatgaatcttggaaacattattctaagtaaaagattccatttttatgaaatgtccagaataggcaaatctatagagacaaagataagtggtttccaggggttgtggggaggagagaatgggaaggtgacaaaatgttctggattagataatagggatgggtataacttagtgactatacaaaaaaaatcactagaatcatatactttaaaaaagatattcccataaaaaaaagaacaagcaagaaaaaataactaaatttgactttaggagttaaaaagaatatagtatctcaaatgaaaattttgctggataggattaggggtagattagacactccagaagttaaagatcagtgagcttgaatacacacaatagaagctagtctaaacaaagcacagagagaaaaaagaacaaaacaaacctcccacaacaaaacaaaacaaaagccaaccaaaaatacagcctcaatgacctatgggaaatatttagcagtctaatatacatgtaattggaatccctgaaggaggaggggggtagaatgtatctttttttgtcccctatgactgctgttaagattttattattgatttttaggaattgcattatatcttggtgtggttgtttaaacagaggtatagcttatcaaccaatggtggagctaaaatagaatacttgaaagtacttatggatgcacagaatctaagatggcccccaattttcctgctaccttgtacccttgagtatatgtgggacctgttacttgcttctaaccaataaaatctcacaccagttagaatggtgattattaaaaagtcaggaaacaacggatgctggagaggatgtggaaaaataggaacgcttttacactgttggtggaagtgtaaattagctcagccattgtggaagacagtggcaattcctcaaggatctagaactagaaataccatttgacccagccatcccgttactgggtatataaccagaggattataaatcattctactataaagacacatgcacacgtatgtttattgcggcactgttcacaatagcaaagactcggaaccaacccaaatgtccatcagtgatagactggatgaagacaatgtagcacatatacaccagggaatactatgcagctataaaaaatgacgagttcatgtcctttgcagggacatggatgaagctggaaaccatcattctcagcaaactatcacaagaacagaaaaccaaacaccacatcttctcactcataagtggcagttgaacaatgagaacacatggacacaaggcagggaacatcacacaccggggcctgtgtggggggtcgggggcagggggagggatagcattaggagaaatacctaatgtagttgacattactttggtttgacattactttggtttgtgggtgccacaaaccaccatggcacatgtatacctgtgttacaaacctgcacgttctgtacatgtaccccagaacttaaagtataataataataaaataacatgtatgtcaagggtgacatgtaattaagcaaagctcagtaaatttaaaatgattgaaattgtactaagttttctgaccacgctagaattaagctagaactccaggtccagatggcttactgatcaattttacccaacactttggaatgaataatgacatttgtatgaaagtcctttcagaaaatagaagatgagggaatatttcctgaaccattttatgaggccagtattgacatgggtaataaaaccaacaaatacattacacaaaaaaattgtagcacatgatatccctgataaaaccaaatgcaaaaatacattaaatttgcaaattgaatgcagcagtagataaaaaggacaataatacatcatggccaagtagggtttatcccagcaaggtaagactggtttaacatctaaaatcaatcagtataattcatcatatcgataggatgaaggaaaaaaactcatgtgaccatctcaacgattgcagaaaatgtatgtgacaatattcaacacccattaatgataaaaatgttaaatacattacaatagaagaaaacttcctcagccttatcaagggtacctgtgagaaaattatggataacatttttcttaatggtggtagactgaatgctttcccctatggtcagaaaaagacaaaactcatcactgctatacaacatttcatgagaggtcagcagtgctttcatgccttaaaggcatgaaaatgaaataagtgatttaagattggaaagaagaactaaaactacgtttgctgatatcaaaaatcccaagaaatctgcccccaaaaagcacttatgaattaataattaaacttaacaaggaagcaggatataagaccactgtataaaaatcaattggaaaactaaaacaaaaccccaaaaaacccaacctaataatctgtttccaataacaccaaaaaacatggaatactcagggatgaattataagtagggataaacaaggtgtgtgcaagacctgacaatgaaaactattaaatgttgttgagaggaactaaggatgacttaaataactggagagacatactatgttcatggactgaaagatatgcaatattgataagatgtcaattcttccaaaattgatacatggattatttagcttggtaaaaatccaagcttttttttgtagagttttcaagcattttgtaaaatttatttggaaatacaaataatctgaatagccaaaacaatgtggagaaaaggagaaaaaattagagaacttacattacctgtttttaagacttactataaaatcttactttcaggtgtggtattggtatcttactgtaaagtcttcctgtaaagtatattgatatttagtgtggtgttggcataaggatagatatttaggcctatggaatagaatagagggtccaatagtagattcatgtatctgtagtcaagtgattttcagcaaagaagccaagggaagggatcatcttttcagggtagtgttggaacaactggatatctattatggaaaaagtgaacctttatactgtatactgtatgcactcaaattttactttggactggatcacagattcaaatataatagagatatctaaaaaccttccaaaagaaagtataggagaaaaattcttgcaattttgcatagacaaagatatcttagttcctagaaaacataaccataaaataaaaattacatcaaatagacttcatcaaaattggaaatttctactctttgaaatatactgttaagaaaatgaaaagacaagaaaattcccattacatagctcacaaaatacttataactaggatatgtagagaacacttcaatactaagacaatgcaataaaaaaacaaaaaaactggacacaacaagaatatatatgaaatactcataagcacatgaaaagattattaacatcattaatcatacaggaaatgcagattaaaaccacaacgagatactaccatgtacacactaaaatggctaaagccaaagacactgacataaatttttggtgagtgtggggctcctggagccctcagacattgctgataggactgtgaaatgacacagccactttggaaaatgagttcatcatttctaactaagttaaacatacacataccttaatttcattcctaggtatttatctaagggataagaacacatgtgttcacacaaattgtgtggtgttcatagcagctttattcataatatcaaaacattggaaacaatctacatgtctatcagcaagtgaatggaaaaatattttgtagtatatccatgcaatgaaatattacccagcaataaaaataaactatgggtacatacaacaatataaatgaatctcaaaaatatgccgagtgataaaagccattctggttccatttacatgaaattctaggaaaggggaatctatggaggcagaaagcaggtcagaggttgctttggtctaggggatcgagaggccttactgccaaacagcaccagtagattctttgggggggcggaagagttttatattttcattgttgtgctgtttacatggggatatgcatttgtcaaaactcactgagctctacatttaaaatgggtacatttttgtagtattttaattataaatcaaaattgaacaaaaaagtaacacatgttatttgaggacttttttttttaaagcatcatgttttatttttattttttgcagacaagggttttatttaatataactcataaattacattgccaatatcctaaaggtaataaagaagtcaaaagcactatttgtgaaaatcagtatatcatatgacggtaagcatagttgctattcaccaaaaacgttcagaaaacatttgaattcattgtctgaaagagcttaggctcaagacttgaattactaagaaaagaaagtagtatataattatacaaagatgagtaataaccaaaaactgttctttaatgcatgtttgtttttcctgaaagccatttctttctttttttcttttaatactttaagttctagggtatactttaagttctagggtacatgtgcacaacatgcagatttgttacatatgtatacatgagccatgttggtgtgctgcacccattaagtcgacatttacattaggtgtgtctcctaatgctatccctccccactccccctaccccaggacaggccccggtgtgttatattcccctttctgtgttcaagtgttctcattgttcaatgagtgagaatatgaggtgtttggttttttgtccctgcgatagtttgctgagaataatggtttccagcttcatccatgtccctacaaaggacatgaactcatccttttttatggctgcatagtattccatggtgtatgtgtgccacattttatttttatttttattatttttatttttaaaattttattattatactttaagttagtgtacatgtgcacaacatgcaggtttgttacatatgtatatatgtgccatgttggtgtgctgcacccattaactcgtcatttaacattagatatatctcctaatgctatccctccccctaccccgaccccacaacagtccccggtgtgtgatgttccccttcctgtgtcaatgtgttctcattgttcaattcccacctatgagtggcaacatgtggtgtttggttttttgtccttgagatagtttgctgagaatgatggtttccagtttcatccatgtccctacaaagcacatgaactcattatttttcatggctgcatagtattccgtggtgtatagtgccacattttcttaatccagtctatcactgatggacatttgggttggttccaagtctttgctattgtgaatagtgcctcaataaacatacgtgtgcatgtgtctttatagcagcatgatttataatcctttgtgtatatacccagtaatgggatggctgggtcaaatggtatttctagttctagatccttgaggaatcgccacactgtcttccacaatggttgaaccagtttacagtcccaccaacagtgtaaaagcattcctatttctccacatcctctccagcacctgttgtttcctgactttttaatgatcgccattctaactggtgtgagatggtatctcattgtggttttgatttgcatttctctgatggccagtgatggtgagcattttttcatgtgtcttttggctgcataaatgtcttcttttgagaagtgtctgttcatatccttcgcctacttgttgatggggttgtttgtttttttcttgtaaatttgttcgagttcattgtagattctggatattagccctttgtcagatgaatagattgtgaaaattttctcccatcctgtaggttgcttgttcactctgatggtagtttcttttgctgtgcagaagctctttagtttaattagatcctgtttgtcaattttggcttttgttgccttgcttttggtgttttagacatgaagtccttgcccatgcctatgtcctgaatggtattgcctaggttttcttctagggtttttatggttttaggtctagcatttaagtctttaatccatcttgaattaatttttgtataaggtgtaaggaagggatctagtttcagctttctacatatggctagccagttttcccagcaccatttattaaatagggaatcatttccccatttcttgtttttgtcaggtttgtcaaagatcaggtagttgtagatatgtggcattatttctgagggctctgttctgttccattggtctatatctctgttttggtaccagtaccatgctgttttggtgactgtagccttgtagtatagtttgaagtcaggtaccgtgatgcctccagctttgttcttttggcttaggattgatttggtaatgcgggctcttgtttggttccatatgaactttaaagtagttttttccaattctgtaaagaaagtcattggtagcttgatggggatggcattgaatctataaattaccttgggcagtatggccattttcacaatattgattcttcctacccatgagcatggaatgttcctccatttgtttgtatcctcttttatttccttgagcagtggtttgtagttctccttgaagaggtccttcacatcccttgtaagttggattcctaggtattttattctgtttgaagcaactgtgaatgggagttcactcgtgatttggctctctgtttgtctgttattggtgtataagaatgcttgtgatttttgcacattgattttgtatcctgagactttgctgaagttgcttatgagcttaaggagattttgggctgagacgatggggttttctagatatacaatcatgtcatctgcaaacagggacaatttgacttcctcttttcctaatcgaataccctttatttccttctccttcctgattgccttggcaagaacttccaacactatgttgaataggagtggtgagagaggacatccctgtcttgtgccagttttcaaagggaatgcttccagtttttgcccattcagtatgatattggctgtgggtttgtcataaatagctcttattatttggagatacatcccatgaatacctaatttattgagagtttttagcatgaagggctgttgaaatttgtcaaaggccttttctgcatgtattgagataatcatgtggtttttgtctttggttctgtttatatgctggattacgtttattgattttcatatgttgaaccagccttgcatcccagggatgaagcccacttgattatggtggatcagctttttgatgtgctgctggattcggtttgccagtactttattgaggatttgttcattgatgtacatcagggatattagtgtaaaattctctttttttgttgtgtctctgccaggctttggtatcaggatgatgctggcctcatcaaatgagttagggaggattccctctttttctattgattggaatagtttcagaaggaatggtaccagctcctccttgtacctgtggtagaatttggctgtgaatccgtctggtcctggacttttattggttggtaagctattaattattgcctcaatttcagagcctgttattggtctattcagagattcaacttcttcctggtttagttttgggagagtgtatgtatcgaggaatttatccatttcttccagattttctagttcattttcatagaggtgtttatagtattctctgatggtagtttgtatttctgtgggataggtggtgatatcccctttatcattttttattgcatctatttgattcttctctcttttcttctttattagtcttgctagcagtctatcaattttgttgatcttttcaagaaaccagctcctggattcattgattttttgaagggttttttgtgtctctatttccttcagttctgctctgatcttagttatttcttgccttctgttggcttttgaatgtgtttgctcttgcttctctagttcttttaattgtgatgttagggtgtcaattttagatctttcctgctttctcttgtggacattcagtgcaataaatttcccactacaaactactttgaatgtgtcccagagattctggtatgttttgtctttgttctcattggtttcaaagaatatctttatttctgccttcattttgttatgtacccagtagtcatttaggagcaggttgttcaatttccatgtagtcgagcggttttgagtgagtttcttaatcctgagttctagtttgattgcactgtggtctaagagacagtttgtcataatttctgttcttttacatttgctgaggagtgctttacttccaactatgtggtcagttttggaataggagtggtgtggtgctgagaagaatgtatattctgttgctttggggtggagagttctgtagatgtctattaggtccacttggtgcagagctgagttcagttcctggatatccttgttaactttctgtcatgtggatctgtctaatgttgacagtggggtgttgaagtctcccattattattgtgtgggagtctacgtctcttagtaggtctctaaggacttgctttatgaatctggctgctcctgtattgggtgcatatatatttaggatagttagctcttcttgttgaattgatccctttatcattatgtaatggccttctttgtctcttttgacctttgttggtttaaagtctgttttatcagagactaggattgcaacccctgccttattttgttttccatttgcttcgcagatcttcctccatccctttaatttgagcctatgtgtgtctctgcatgtgagatgggtttcctgaatacagcacactgatgagtcttgactctttatccaatttgccagtttgggtcttttaattggagcatttagcccatttacatttaaggttaatattgttacgtgtgaatttgatcctgtcattatgatgttagctggttaatttgcctgttagttgatgcagtttcttcctagcctcgatggtctttacaatttggcatgattttgcagtggctggtaccgtatgttcctttccatgtttagtgcttccttcaggagctcttttagggcaggcctggtggtgacaaaatctctcagcatttgcttgtctgtaaaggattttatttctccttcacttatgaagcttagtttggctggatatgaaattctgggttgaaaattctttccttcaggaatgttgaatattggtccccactctcttccggcttgtagggtttctgccgagagatcagctgttagtctaatgggcttccctttgtgggtaacctgacctttctctctggctgcccttaacattttttccttcatttcaactttggtgaatctgacaattatgtgtcttggagttgctcttcttgaggagtatctttgtggcgttctctgtatttcctgaatttgaatgttggcctgccttgctagattggagaagttctcctggataatatcctgaagagttttttccaacttggttccattctccccgtcactttcaggtacaccaatcagatatagatttggtcttttcacatagtcccatatttcttggaggctttgttcgtttctttttattcttttttctgtaaacttctcgcttcatttcattcatttgatcttccatcactgatacccttccttccatttgatcgaatcagcaactgaggcttgtgcattcatcatgtagttcttgtgctgtggttttcagcttcatctggtcctttaaggacttctctgcattggttattctagttagccgttcgtctgattttttttcaaggtttttaacttctttgccatgggttcgaacttcctcctttacctcagagtagtttgatcatctgaagccttctgctctcaactcgtcaaagtcattctccatccagctttgttctgttgctgctgaggagctgcgttcctttggaggaggagaggtgctctgatttttagagtttccagtttttctgctctgtttttcccccatctttgtggttttatttacctttggtctttgatgatggtgacgtacagatggggttttggtgtggatgtcctttctgtttgttagttttccttctaacagttaggaccctcagctgcaggtctgttggtgtttgctggaggtccactccagaccctgtttgcctgggtatcagcagcagaggctgcagaacagcagatattggtgaacagcaaatgttgctgcctgatcgttcctttggaagttttttctcagaggagtacccggccatgtgaggtgtcattcagcccctactgcggggtgcctcccagttaagctactcgggagtcagggacccacttgaggaggcagtctgtccattctcagatctcaagctgcatgctgggagaaccactactctcttcaaggctgtcagacagtgacatttaagtctgcagaggttattgctcccttttgtttggctatgccctgcccccagaggtggagtctacagaggcaggcaggcctccttgagctgcagtgggctccacccagttcaagcttcccggctgctttacctactcaagcctgggcaatggcgggcgcccctcccccagcctggctgccaccttgcagtttgatctcagactgctgtgctagcaatgagcaaggctccgtgggcataggaccctccgagccaggcacgggatataatctcctggtgtgccatttgctaagactgttggaaaagtgcagtattagggtgagagtgacccgattttccaggtgccgtctgtcacccctttctttgactaggaaagggaattccctgaccccttgtgcttcccaggtgaggcgatgcgtcaccattctttggctcacgcttggtgtgctgcacccactgtcctgcacccactgtccgacactccccagtgagatgaacccgttatgtcagttggaaatgcagaaatcacccgtcttctgcgttgctcacgctgggcactgtagactggagctgttcctatttggccatcttggttccatcccccctacttttgagattttaaacttgggatgcctttgattcattttattcaagtattaatttgagtaaaaagtcatgtatgtgcatgaagtattagctgcagtggtggttttgttcttcataactttgctcataatagctttgtttatttatttattcatttatttatttttgagacagggtcttgctctgtcacccaggctgtagtgcagtgacatgatcttggctgacagcaacctctgcttcccaggttcaagtgattctcctgtctctgcctcctgagtagctggaattacaggcatgtgccaccatgcctggctatgttttgtatttttagtagagacagggttttgccatgttggccaggctggtctcgaactcctgacctcaggtgatccacccgccttggctgcccaaagtgctgggattacaggcatcagccaccatgcctggcctgctaataataactttaaaaaacctaacatttcatattttgataaataaatgcagtactcatatccagttgaaagggaaatacaacattatttaataaacatattacatctaaatattaaaaaattcctatcatatgataaattaaaaaaaagagaagagattaagcaggggcttagaaacataaacaaatataaacaaactttacaaaactgaatggattagcagggtgttggggcacatgcttgtagttccatctccttggaaggctgaagcagaaggatcccttgaacctagcccaggcaataaagcaagaccctgtctcttaaacaaaacaaaacacaaaacaaaacagagacaattggaggaagacagaaactagaaagaaagtgtaaaaaaataaaaacaccccaaaactcacagaaattaaagtgatttttaaaagttgggttgtttatttgttaactatgagcatgaccgctctacagtcagaaaagataaaatcaaggctcagatggggaaacgcatggtgctgcttttagaaccatgctcagaaagatttggtggagtttaaacaaacaagttcagacttctgttgccctcttttataggagtgaaagagaaaggaaggaaagatttacaaaggtgtaaatccctttcatcccctggaccacagaggtgtagcagagaatggttcctgtaagacttgaaaactgaaagtacaacataggtgcaatttgtgactaagtatcactggtacaaagaacttaactgattgaaatatatcaataagtaatctcttgggtggtcatacaggaatgcttaaaacctcagacccaattaatggcaaaacaatgaccctacatctgttttttatgtatacacacacacacacacacacacacacacacacacacacacacacaaatacatatgtaacaaccttttttcatggactgtcttagttcatctcattttgaggaaatagttgttgaatgacttctgtgtgtttctgtgacattgtattaagtattcaaatacagacttaaaaaagtaacttcctcttatggctattatattttaatattcctgaggcagatcattatcgattacctgtcagtctccttggggtttccatgatatccccttgacacatctctattgttgtcttccacattgctttgtgatggcttctgttcgttcatcttcttctccagactgtgagcttcttgataacaagatctttgtctcactgttttgggattctcagatcttagcacagtcctagaacattttatgctcttttcaaaccttcgttgaatgaatacattaatgattctcaagtatatatttcaagtgttgacctgtcccctaaattccagagctgctatcatcatcttcctgttgaatatttccatgagtctactatctttcacaaacccaaactgcttctcttccgtgacaaatcagcagccccttctggctccactgtttttgaagtaggcccccttaaagctgaagattcacagtttatttgtccatagttgccctatcttagcaccctattttaaaatgtgtttttgttatgcagactttgtaagggtcaaatcatggccttcaaatcgatttagagaaattgaaatctcgcaatgaatatctcatgagaagagaagcataatgaagactacaaaaaagcaatgcatttaaaaagtagcatgttgctcctgtgtgtgtatagcacaagagaagcttagaagagtgacgatatctcccagctgtcacacttttattttatatccttcagttatttgtggcaatgatggaaaccagaacaatatgattgacatccttagagtattcataacactattcttagctcgcatgtgaccttgcattccctcagacctttcaccatttctcttttaaacaaatttttaaattttctaacaatctccagtttacaagaacggctatagcacagtccaaagacctttttttttttttttttctgaaccatttgaaagtaaattgctaatcaaatgttctatcacctataaatacttctgtgtgtttttcctacaaactaggtcacttccctgcaggaccctcagacaagcataaaaatcaggaaagtaacactgattacttactattacttactattcttttttttttttttttttttgagcagatctcaacagtgggcttaaaatcttcactaaaccatgtgttgtcatttctggaacacaggtagaatagatgtagcataattctatttttttttttttttttaggtggagtcttgtgctgttgcccaggctggagtgcagcggcacaatcttggctcattgcaacctccacttcctgggctcaagcaattctcctgcctcagcctcccaaatagctgggacgacaggcacatgccaccatgcctggctaatttttgtatttttagtagagataaggtttcaccatgttggccaggctggacttgagctccagacctcaggtgatccactcacctcagcctcccaaagtgctaggattacaggcataagccactgcacccagccagatgtagcataattcttaagggccctaggatttttggaatggtaaaggagcactggtttcaacttcaagtcaccagctgtattagcccctaacaagagagccaggctgtcctttcaagctttgaagccaaatatcgacttctcccttctagttacaaatgtcctagatggcatcttctcccattaaaggctgtttttgtctacattggaaatctgttgtttaatgtagccactttcattatgatcttagctagattttctagataacttgctgcagcttctacattaacccttgctgcttcaccttgcacttttatgttatgaagacagcctctttcctcaaacctcataaaccagcctctgctagattccaggttttcttctgtagtttccccacctccctcagcctttatagaattgaagagttaggacttttctctaggttagggtggggcttaaagaaatgttgtgattggttggatcttctatctaggccactcaaactttctccctatcagcaacacagctgtttcactgctttatcatttgtgtgctcactggagtggcactttagtctctttcaagaacttttctttgcattcataacttggctgtttggcaccagaggcctagcttgtgacttctctcagcttttgacctgccacccttactaaggtcaatagtttcttttgatttaaggtgacagatgtgtgactcttctttcacttgaacacttagaggccattgtagggttattaattggcccaatttcaatattgttgtgtctgagggaatagagaggcccaaagggagggagagagacaggggaaccacctgttggtggagcagtcagaacacacacattggttgattaagttcacagtcttatgggcatattgtgtggttcccccaaacacttacagtagtaacagcaaagattacttattgatcataggtcataataatagataaaataataattaaaaaattgaaatattctgaattaccaaaatgtgatacagagacatggtgtgagcccatgttgttggaaaaatggtggtgatagccttgattaacacagggttgccacaaaacttcaatttgtaaaaaacataatacctgcaaagcaactaaagtgaagtgcagtaaaacgaggttatacctgtatattaataggtgactccaataaagacttcggtaatctataacaaggagccaactatcaaatggcaactgcaaagatagttctctcactgaagctaacaaaaacatctacaaactttcagctgaaaaatcaaaaaagtttgagttgtataggacattctaacaccagggaatgagacatatctttttgtatgtaataataatgcaagcctgaaagtcttccagtgactcacagagtaataactgtgacagaggctttctgaattacacatggtgaattttacaaaaacataatatgtggatgatgtttacataagtttatatcttcttccatactatgtaatgtggttctacaaatgtttaggtaattagggtttaggagggtataattaaatgatttattattcaataatatgcttgtgttgggacattgtggaattttacctgctattgttgtgaggcccggagccaaatttaatcttatctattagtgcacaatatatttcttaaccagattttaaagaaaatctagccaaagttgtatgtgattcatgttgtatcttcctcctgatgttagttttaatgctttaagatagtagtagctatgattgatgccactgaaacttttagttcacttgactcctctatatagcccatggatacccagtgtagtacattgatttggttttatgactattgacaccattttctgatttatgaaggttgacttgtccacaatcggtgagagctgggatttaatccagatattctggctacaatcccaataagagatgggtcattcttatccttcattcatgtattcattcattcatatcattcattcattcattctttacacagaaatgtgttggtacctatgatgtaccaggtatttttctagccatgggaggcatatcaacaaatgaaaatgataagaacccctaccctgtggagcttacattccagtagggcagaggggaaacaatggcagataacataataagtaaattctgtagtatattaagtggtagtaatgtatacttggaaaaaagtaagcaggtaaatggaattgggcataccaattttatacctctttggagggagatatgaattaatttttcaattttatctcataaattatgtcaaaataataggttttgtcccaagcctttccaagcaggtagcctggaacaagtgttctgctcttctcctctctccccactactcagaacattgctataaaagatagctaaattacaagatcaacttacagagtcctacttaattcattatgtagctcaactgtggttcaaatctagtagtgttatagacctaaccagtccttacagtgggttttctccccagtctggtaaactgtattccatgctccagctgcaggtgacaggaacctcatcctttcatgctgctcttttagctttgggagtaagcaactccctctccttccacattatccaatattgtgcggcagagacttgcttccattaaagatactgatagtggctcctccactgctagaagcaggaggatgatcttggggaatgattatggatttaaaggaggaagagatagtagcataggcttctgttttcacaggaaataggaaggttgacagttggaagaaatcgtagaggagtcccagctgggatcagtgacaggagggaggaaaagggaggccctggtctcacaggaaggttgagttattgggatgtttatgagtcaaggatggtcgcttatcacccagtatgtaggtttctgtagataaattcctgagatgaatttacctatgccttcttgcttgatttcttttttgctttttctttctttctccctttccctttccttttcctttcccagggtattgctcttttgcccaggctggagtgcagtgtgcaattatagctcactgcagactcaaactcataggctcaagtgatcctcttgcctcagtcttctgagtagctaggaccacaagcatgcaccactatgcctatctaattttttaatgtttttgtagggatgggattttgctatgttgtccaggctggtcttaagctcctggcctcaggtgatccttccatcttggcctcccaaaatgctgagattataggtgtaagccaccatgcctagcctcatttaattttcataaagtctgaaattattatctactctaagtttggcaagcaactggttgtttagagtttagtaataattttttgaaaagatataatggatataatttttacatatttgtttaatagcatcctcacaaagaaatttttaaatttcttttatagaattctgattattttacagccctgaggtactcttaattttaaaatatatttcttttttaatacattatttttcataaaggctttataatcagcatgcttttattttttaaaaatattgtactactaatattgttgcataacttcaaaaattatcatttagtagccatataatactggctaataattaacataatataatataataaatataatataatataatatatagtctattgataaataggtatttgagtgtttatctgtttgccttgtattatactaggaaatgtggcttgccaaaataaatgcattatgctttcggttagcttgtagtctcattcataaagcaatgtagatacaatgcagtaaggataaggtgaaatctgcctttgcaaagggatttttaatttggaaaaagaagggatttgtgggacaatgagatagaaggctttacagaaaaactagatggctttgtggagaaagagaatttaactagttattaccagttcaaccgctacatccccattcagaccatcagcatactgtgtgtcttcctttttccctgctttccccttgcaatctatttgctatacaggtgccacagtaaaaagcaattcagatcaagtgactcctctgttcagaacccaccagtggtttctcaggtcatttataatgaacccctcagtctttaatgatatagcctacaaagttctgcatgatctgcccccttggctgcctctctaacctgatttctgacttgtgttttccttacacacactgtctcttgatgctggacgcattcctgtacgtcacacactcccagcatgctctcacattacaatgtttgtaattgccattccctccaccttgaaagtttgtctctgcagtatttccctggcttgctctcatttcctttggatctctgctcacatgttacctccttagagagggccttcctgaaaatgatagaagtgttttttttggagcacatcccctcactccccagctcctctccagtgtatttttctccatagcatctttctgcctgaccttgtatttctatatctttttgctttttatcttctggaaaacaagctccatgagatcacacagggattttgctttattcctcactgcatgtcccctcctaatacagttcctggaatacaggtgggggttcataaatatttgttgggtaaatgaaagaatatattaaaatattatcataaaccttttttctttccatgatttgatgatgtggaattgaaaacaggtctacatagatgatagtgatataatcaacagcattcctgagtacgtctaggatcagcacttggtctagaaaagatctgtcttctgccctcctttcccgtccatgcacatccactgcctttgggatcaaacccaatctccttcctctggcagtcagggccttctgagacctcatctctgttgatctttctagctttacttctaccaagtcattcccctcataactgcatgtcatactgagtggcttatagttcccctcctgtggcccttgcagatatttcttgcattgcttttcatttgtcacttatttgtttatgggtttctcctcacagtgcataagctcttcaaaggaagaggcctggtatatctttgtatttctgggatctagcgcagttcttgtatattgtagatggtcagtaaatacttattcaatgtaaaagatgttttttgccttccaaagactagtggtaacttgaaatggttggatataggacagataaactgatagaagcagttttacctcattagagggcttggatataagtatgtccagggacaaatatagtaaaaaagagagcaatattataatatcctttaaaaaaaaaaaaagagacaggtcttgctgtgttgcccaggctggtgccattatggctcactgtaacctcaaactcctgggctcaaacagttctcctccttcagcttcctgaatagctaggactactggtgtgtgccaccatggcggctaattaaattttttttttttttttttttttttttttttgtagaaatgggttctcactatgttgcccaggctggtctcaaattcctggcctcaagtgatcctcccatctcagcatctcaaagtgctgagattataggcgtgagccactgtgcctggctagaatatcctaacttttagcaaaatcatacctgagatgaggaaggatggcatataacatgattgaatcagcacacttaactaagaaagatagcctaagtggaaagaagggttatttgaaaggcattatttagaaagaaggggagccatttggcagtggactgactatgtgggcatcagtcctttatttagtcactgagagtcatgcaaggtggtgagcctgctgataatgaggaaataatacagaggggagaattcaggggagtgatgacacgttcacgttcttgctattttggacttattaacaacgtgagtgttgagggttatgatagtgttagcctggctgctcctggttcgggaaagagtgctatgaaaattgagatatatctgtctagtgtatgggaggagaaaatggctgtatttggttctatatatttgtcatgcctggttgatggtttgtattttctatagtgatttgtgagtgacaatggatctatattcaattgacccagtatagttgaatatgtgaaaatattttatgtaattttactaatatatattttgttaaaatacaaccatatagaatctactaggctataggtgttgaaagataacatttttttttttctaaatcaggtttgttacagaaggagaaagtggcagttgaagcatttcagatttgctgccttctcctacctcctgaaaataggagaaagttacagctattgatgaggatgatggcaaggatttgcttaaacaaagagatgccacccctgtgtgatggctttggtacccgaacactggtaggttgatttttaacatcaggtatgactttttggaatgaaagtcgactgagtaaggtgtattagtttgggtgatcagagggaagtacaaagcagacttgcttaaaagagccacagtcagtgtccacccagacttgtgtcgtgcttttgttctaagtgtcttaaagaacataatgagaaatggagacttgagtaggggcagactctgtagagagatctgctacatcctgttctcccacttaaaattattttaaatttattcttaattgacaactaataattgcatatgtgatgttttaattcatgtatacattatagagtcaatcaagctaattaacagattcattaccataccaacttatcatttttttgtaatgagatcattaaaaatctattcttttctcaattttgaaatatacaatatattattataattgtcgtcaccgtgctgtgcactagagcattaagacttgatcctcctgtctcactggatctttgtaccctttgaccaacatctatttccatgtccctgtatcccccagcctgtggtacctaccatctaatctctgcttctattggcatatgtttttaaagagagtttattttagaatttacttactagcaaaatctcttgattttcctcaaaaaatgtctttgagcaaaactggtgcttcagtggaatgtatgtgctttccatatcctgttaaaacaccgtgtactccctggggattcactggcccagttttagaagtaatagagtgagatcagaggagcacttagtgcccagtaggattcttgatctctatatttttttggagtgagtggatggttagagaggctaatagacctttttgaaaagctgaagaaaactttatatctattctgcatataaaatacacatgcaaaactttgcatgcagtttcaaggcgatcacagagtccctggggtccatggtctccaggcaaaaaattctctgcctgtgtgtctctctgtacatgtaaatgtaagtgaagatcatttgcagtgtgttaatgaagtgttactaagcagaattacatgattttttgcttaaagattttgaaggaagattgtcagcaataaaagtagtaggaaaaaacaaaacaaaacaaaagccagtccaaagaacagtattaagaatggagtagttaggctgggcgtggtggctcactcctgtaatcccagcactttgggaggccgaggcaggtggatcacctgaggtcaggagttctagaccagcctgaccaacatggtgaaaccccgtctctattaaaattacaaaaattagctgggcatggtggcaggcgcctgtaatcccagctactcgggaggctggggcaggagaattgcttgaacctgggaggtggaggttacagtgagccaagatcacaccattgcactccagcataggttacagagcgagactccgtaaaaaaaaaaaaaaaaaaaaagaatagttaatttcaattctatggaaattattacattgatgctataatatattttgcatttctgcttgcctcaaagagagtctcatcacttaatgtacttcttgaaaagtcccatggctttgttcaaagatgattgtcaaatatacatcgaaaatcctagagaaaataagctaactaggaaaagatgtaatggttgaggcatgtggactgtgttagcggtttaaaacaaatcaataatgaaattaggataaataataattgactaaatggctataaagtgctttgaacttagtagtgctacatgattcaagtcatggtgataatgattttcaaaatttgttttcatatatttatatgtgtgtatgtgtgtgtatatatatatatatatatatatatatatatatgtatatttaaaatcgtgtaaaaggaggtttaaaaattgctcagataagcatctctctgcagtctcttaacaggaagatgcacattttgtttgttctggttgttgagaccgtcaacccatctgagatggctgggtactcttggtagaatatgcaccctgtgccttagaccatttctcatatttgccttttgcaaattagattgcactcagttcagaaaaatactcatctgcgtttaccccccaccccgctctttttttagatggttcagacattttcccgttgcatcttgtgttccaaggatgaagtggacttggatgagttattagctgctagattggtaacgtttctgatggacaattaccaggaaattctgaaagtccctttggccttgcagacctctatagaggagcgtgtggctcatctacgaagagtccaggtaaaggagaggatattatcagttctatgaaattggcaatataaagtcacgtaagcttgctaggcttcttggggcattttattatgaggattaagtgaattaatgtttataaagtacttacaacaggtcttggcacatagtaatcccctgcatgtgtttgtattatcattgaaaagtttacagaatgcacatttggttttgtgtatcaatccatgtggcatattttttattgctaattccttgaatgagtttgtttagaatctacatacacctactgatggaaatgattttatgtgcagtaagtgtcttgattcataattgccctgtgacctagtttaatattcccactttttgcatgaaaaagctaaggcacaaagaacttaaataacttcgcttaaggccacagagccagaattctgactgttgcagtcagcctctgtaatcagtgctctaaactatcattccatattgcctgtctaaaaatcatagtacagtagaagaacactggcatgagagccatgaatccctggccaaattcctagctgtatcctttctgtcgtgtgactctgggcaagtcccttaaccgctttggattttactttctttcctcaggcgttaaaatgggctattctttctttataaagttgtgaagattagaacactgtactttacaattcctaggatgaatttctgacatatgtcaggtattctttgaaaggtagctgctgctgttgtcatggtggttatataaaaacaatgcaaaagaaatataatatattattatcgtgtggaccccaaagtggggtttgtatgtcagcctgtgggagcagaaacctggtaaaggcaggcagaaggtccacttgactccttctgactgattggacctcttctcatttgagatctttttgaggcaccacaatcaaggaccagtgaactgcctccttctgaggtattacaaaaataattaattgtccagctgtttctagaaggcaattttaaaattaaaattttttctatttttttgcaattatcaacctaacacattgaagaaacttgggaaatatagaaaaaacacaccaaaaagtatcagagttacactaaaatgttcatagtcagtaatatagtctttcagatttttttttctgtgtctgtctgctgtctatgtccatgcctaccttactttcttccctctctcttccctccccaccctcccttccttccttccctccttcccgccttccctgcttccttcttgcctgcctcccttcctgcctgcctcccttcctgccacttacattctgttaacaatgagaaaaaaattcccccatcattaaatattgttgattggcatgagaatggccaagagcacagactcaggagcctttgaattcatgacatgccttttgttagctgtgtcaccttaggcaaattatataacatgtctgtgcttcaacatctgtcccaacatttctttttctcatctgtaaaatgggaataatagtagttaatatttacctcatagagtttttctggggaattaaaacatgtgattaaaatacatgtgggcttaatacatgtgaaatgctcacaataatgtttatcacattgtaaacctacaattagtagctgcctttgttgttggtatcatcattattgttatattattccataataatattattggcaacatagtattccataatatggatataccataatttatttaaatgatactttttggttggtatttagattgttttcatgctttcccccattttggaagcaatatagcagtaaatatttttaaaggtagattttttttggctaatctgtgattattttttaagaataaactcctaggggcagcattgcttggccaaaggccatgaacatattttaagtatctatagcatattgccaaatttagaatgatcatttcaatttacatttctgtcagtggtataagagagtgttcatttctttgcccctttgcctactttggatattatcattaacacttgtatatatctttgccacttgcatgggtgaaaagtgtaattttaactgctgttttagtttaattttttcctctgatatttttatgagccaaccctaaagaaaataaaaatgaacagaaatacttcaccaagtttctgcaaggaaatgttatagcagtgtattagtctgctctcatgctgctaataaagacatacccaagactgggtaatttgtaaaggaaagaggtttcattgactcagagttcagcatggctggggaggccccaggaaacttacaatcatggcagaaggggaagcaaacacatccttcatgaggcagcaggagagagaagcaccgagcaaaagggagaaaagcccctcataaaaccatcagatctcatgagaactcactcactatcataagaacagcatggggggaaccaccctgtgattcagttacctcccatctcccacagcaaggggattatgggaactacatttcaagatgagatttgggtgaggacacagccaaacaatatcaagcaataactgtgttgccctgtatacttgctaggtttgtgtattcacatgcatagcacaggcatatattgtagtaacttagccttgtgagccctttgctattacttgaagttcagaaggctgagctatggtgattaatttaactgcaggtaaacatgatcttgttaagagacactgcagtgtgctctgaataaaatcagtagtgattcatttgtccagttaccttttctctcttgcaagtacatattagaattgccaagcacctgttccattcagccctcagaacctatagatctttgttcttttgattaggctcctaagcctctacactgtatcacatttaggggagtgcttctctgaaaatgcagtgttgcttggattattccagtgattgttttaggacagtttcagggctgaccctgggatacattattaggtaggcaatgtttttgacacaagccttctatgatcctcatctgcaaccttctatttcaaaggactccaggctctgaaattaaatatttttaatgtatgttcatttattcacaggccttggtttcctttttcctcttatttctctcttctcccttatcccttctgcaatgtctgcacctttgttgttttacttgattctcatgggtaagatgttaggaaatgattgtagtacccctctcttcctaaaagcttagctaaatgcrtgccactaccatccccaaggcattgagaatcacactcttcagatgtgggaatgcgcctggatagttccagtggatatccaacattatcaatgttttgaatcaytttagtcaatgtgtttaatttatgcttgaatttcagatcttgttaaaagagggaatgccgagaccagctcggtcgtggagaccctaacccagtggccctagaggaattaaagacacacacacacacacacacaaatatagaatgtggagtgggaaatcaggggtcttacagccttcagagctgagagctttgaacagagatttacccacatatttattgacagcaagccagtcataagatttactaaaagtattccttatgggaaataaaggggtgggtgaaataaagggaagagctctggctagttatctgcagcatgaacatgtctttaaggcacagatcgctcatgctatygtttgtggtttaagaatgccttaagcggttttccgccctgggtgggccaggtgttccttgccctcattcctgtaaacggacaaccttccagcatgggcatcaaggccatcacgagcatgtcacagtgctgcagagatttkgtttatggccagttttggggcctgttcccaacgagggcacaagctttttttgttattgaaatggctcttgggtttacaaaggtaaaaatccaatttaaaaccgtggctttaaataataatattttgaagttatggaaatacttttacttttcaatatagagtttcccccaatcaaattttgaggactaacatggcattgctacggtacaaggagatatcctgtatttgatctaaactaattcttataatttatttgaaaatatgctatattctttcactactaatccttttgcctcagataaaatacccaggagctgatatggatatcactttatctgctccatcattttgccgtcaaattagtccagaggaatttgaatatcaaagatcatatggctctcaggaacctctggcagccttgttggaggaagtcataacagatgccaaactctccaacaaagagaaaaagaagaaactgaagcaggtaaaaggatattctttataagccattttttctcctccctactgtttttatgtttttttttttattttaataggcttcatgtaaatctcatcttctgagccatagcagttttctaagtatattagttcatacattctagaagtctcactgatttacacacttgtggtcagtatcctagatctttattcttcagtgtaaatctgttaccattgccaaactcttcatttttggagctattctctaatatttgtcctttgttttggtatgtggcatgatgtgaattagcagagcatctgctttaatctcagagaagctatcagtgagggtggatttcttttcatgttttcaaaaggcaaatcagatggaattcacaggtgtaaaatgtttagagtttaaaagccgttggttttagatagccactatcaaattagtttcttgcctcaggtatcagtacaagtttttagttcctcttatgttaggggaacacagcttagggttccagcgaatcgtttttaactcacaatatgttacttttgactattcataaaggttgatccatgatcaggtgagtggtttttgtttttaaagactgaactctacatagttggattcagggaacaccgtacatgtgggattacacacagagcaccagagttctgggcttctgatcatattattctcagagtaattttggaggagagtttagtggtaaagatcaacagaaagtatactgcctctcttttaagcttttcacaaagtaatatacaccagaatattccctcttccatttgagcagaagctggtggggctgagttggagaaacagagaaatgatgaaatgtaattgggccaaaattttatttaactgtgtagaacagaagttattttgaagtcagagttacttgtgaatatataaaaagtgaggtctatttatagttggcagtggggggaattttcagaaacatgattaaaaggggaacttatttgaagcttagatcaaaggaaagatggattagctctatagaaattggaatgaaatgttttaacaaaaataaacaaaaacaggaaaatacaggctcagaaactcttaaaatttggctgccaaattttattggcttttatgtgtctttttttactcttcttggaccattcatttttttagtttcagaaatcctatcctgaagtctatcaagaacgatttcctacaccagaaagtgcagcacttctgtttcctgaaaaacccaaaccgaaaccacagctgctaatgtgggcactaaagaagcctttccaaccatttcaaagaactagaagttttcgaatgtaataatacttccacagcaacaggtgctagagaccactgttgttgttttgagtgaatggtggttaggagaaagactttggtggtggaagaaagaaaagcataaaacaaagactactgaaatatagataaagattgccttagtttttaaaaatgtttggccattagtatttttataaaactcaatgctagttttaaagtgtataaattggttaaaatttatgagtcaaatatatagtgataatgttaacatgtttgtaattgctacagaatttaagggtatttttatctctgtgctttctttttcatggtgtttattaaataattgtgtatatacatcctagctactgatatctttattatagccttaagacttaattttaagtcttaaaaatagcgtgtatacttgaataagaaagacactgggtactgttactgtgatgctattgacttagtagccaattatcatttctcctgtataaattccagtttttattgctgcacataaattttttaatgtcttatattgtgatagctatgtcttttattgcagatttattggatgttatgacagattttactaaagctagtgtttttataacatatatattagttgatgtttacctataagtggagtagattttcatctgcctgcaatggtataatttcagtcttagctaaaaatggaaagttgaactggataaattctttgggtacccttagacctctgattctaagtcaaatgcaaatgggttaaataaaatgagactacttcctttataaatatattttcatccttttgaaagtaagtgaaatgtaaataaacttattttttttaaaaatgccatacctcgtgtttcttttttggcatttatttagatcagttagagagcatcctcaaatgcctttgccaatggtcttcatcagtcatttatttctatgagaaaatgaaaagtaagatttgggcttttgtactgactggtctttaggtgagcactttgccaattttttagcattgctttgtccttttgtaaaattgtggtgcacttggattatggagcatctgaaagtcttcctctgagcgcaattacccagaaagctgagagcaacacccactaattggcttacagtactccttggactgatttttccttgcacttaagatttgctcctgttctcttgtagcaaaatacctcctacatctgatgcagattttgcttttaaaaatggaccaaagtattcctattggtttgggtaccaccttacattccaaatacataatgtaatgggagatttttagtgtttcaggattcattctcagactttggcattctgtttagagccaagaataattcttctttctgctctattttcactccgaggtagagtttatttttcagaatctcttttcctgttgcttgtctttggaagtatatgtggttgttttctttccttttttttttaagattacttttttaaaaaaatataacatatttatggagagatcataaaacataagcaccaattaagtgtgaaattgatgaatagataatagcagttatccaaagtggttgtcccaattaacgctcccattaacagtgtatgagaactccttttgtttaatatcctcaccgaaacttgctatcgtcagagtttgaaatgttgtcaatgtggtggttattaatagtgtctgattatggttttattttgcatttccatgattattaatatggctgaacatttttttccatttttttgactttttcgtctttgtacaaattttggtatcagattgtcaagcctrcatacacacacacacacatgcagagacacacactcaccctgttgagtttttttttttaattttgattgtattatatgtataaatcaatttgcagagaattgctgtctacaatattaggtcttctagtccatgaccatggtttacctttccattttatttgaaataaatgagaaaaaaagttgcttttttctgtgaagatttacaaatctttkgttagatttgttcccaagtatttgatactttaaaaaaagtatcaaaattttcaaagactgtagtacccatttcctgtttcaacagttactcagctgatcaatgttgacgtttaattcttttgtaaatgctggtgttgtaaatttccttatagtgtttgttgcttctgtatggtataaaactgatttttcctgagttttgtttacagtgaaccttgctagacttgttaattctaaacatttagtatgattctttggcattgtctacrtattaggaaaaaaacagcttttgcttttccgttccatggtagacagcatctatattgtcctcagtgatccttgcctcctggtatttaatgccttgtgtaatttcctgtccttgagtgtgggtggagctaaaatgacacatttctaaataatagaatatatcatcagtgatggggtatcacttctcagattagattccaaaactctggcttccatcttgcttgtcttccttcttattctctccctggcttgctctgaggaaagccagctgtcatgttgtgagctgccctttcagaggcccaccaggcaaggaactgatgtctctggccaacagccagcgtggacatgaagcctgccaacagctttacgagtgatcttggaagtggatcttcccttggtcaaaccttgaggtgactctaccctagctgacaccttgattggagacttttgagaaactctaagccagaggacttagcaaagctgtgcctggattccttattcacagaaactgtgatataataaatgtttattgttttaacccacttagttgaagaataacttgttataaagtgacctagatacaatatactttccaatctccatacccttccctcccttcccttccgtcccttccctcccttctctcccttcccttcccttcctttcctcccttccctcccttccctcccttcactttccttcttttctttcctttccttcctttccttccttcctttccctggctccctccatcctttccttcttttttgtctcaggacactggagatcttcagtacagcagttccctggttcccatttatctgctgtttcactttgtacagtttcagtaagccacgctcaaccacagtcagaaaatattaaatggaaatattccagaaataaacaagttttaaatkgtgtgctgttcttatagcatgatgaaatcttggactgtcctgctttgtccactctgaaaatgacttatccctttgtttcatggatccatgcctggtagaccaggtacattgtyaatgagcagtaatattttgaaaggaatctttttttttttttttttttttttgagcagcagatctcaatagtgggcttaaaatattgagtaaactatgctgtaaacagatgtactgttatccaggctttgcagagcacaggcagagtagatatagtgtattttttaagggcccaaggattttttgaatgatagatgagcattagcttcagcttcaggtcaccagctgctaacaggagagtcagcttgtcctttgaagttttgaagccaggcattggcttctttatagctatgaaagtcctagatgacatcttctgccaatagaacgctgttttatctacagtgaaaagctattgtttagtgcaaccaccttcatcattgatcttagctagattttctggataacttgctgcagcttctccagcctttgttgcttcaccttgcacttttcagttaatggagatggcttctttccttaaacctcatgaaccaggctttgcttgctttcaacttttcttctgcagtttcctcacctctctcagtctttatagaattgaggagttagggccttgctctatagtaggctttggcttaagggaatattgtcgctggttttatcttctgtcctgaccactcaaatgttctccatttcagcaataaggctgcttagcttttgtatcgtgtgtgtttactggagtggtgcttttaatttccttcaagaactattcctttccactcacaacttgactaactgtttggcacaagagacctaaactttccttctatcttggctttcaacatacctttctcattaagctcaatcatttatagctttcgatttaaagtgagaggcgtgcaactctgtttcacctgaacagaggccattgtagggttattaattggcctgacttcaatattgttgtgtctctgggaatagtgaagcccaaggagagggagagtgatgggggaatggctggtgggtagagcagtcagaacacacaacatttatygattaagttctcagccttatatgggcatggattgtgacaccaacaaacaattacaatagtaacatcaagttcactgatcacagatcaccgtaacagatgtaataataatgaaaaacctttgagtattgtgagaattaccaaaatgtgactcaaagacatgaagtgagcacattactgttggaaaaatggcaccaagagactttctcaatgcagggttgccacaaaccttcaatttgtaaaatatgcagtgatctggatacaatatacaatataatctgtgaagtgcaatgaaaccagatatgcctgtgtatatagtgttcaatactatatggtttcagggccaggcatggtggctcatgcctgtaatcctaacactttgggaggccaaggcaggcagactgcttgaagccaggagtttgagaccagcctggccaacctggtgaaattctgtcactactaaaaatttaaaaattagccaggtgtggtggcgggcgcttctagtcccagctactctggaggctgaggcacgagaatcacttgaacctgggaggcagaggttgcagtgagcccagatcacaccactgcactccagcctgggtgacagagtgagaccctgtatcaacaaaacaaaacaaaactatatggtttcaggcacctatggaggtctgacatatccctagcagataagggggagttactgtttaatgtggaatagagtggggatcgcagcagcatcatcttgctcctaatttcaaagaggaggtttttagcattagagtatttgtagatacccttttataattttaaaagaagttattttctatttctattctattgtcaaaaaatttttattgctcgttttaaccataagttgatgttgaatcttaatcaactacctttcctacatttgaggattttataagttctatcttttagtctatcattggggttatattacattaattgattactaatattaagccactttgcattctaggagtggcataaatctaattatgatgtattatcatttgaatatatatatctagattctgttgctaatatttagtttatagttcttgtatctatgttcatgagtaaaattggcctgaaaatttccttctcttactatctttgttgactttctgatcaaggttataaattaagctgaaaattactctctttttctatatatggttggaattatttctttcttgaatcttgggtgaaacttagttaacttttaaaaaataaataatgtaattacaccgaagtcagaaaaatggtttgtataatttcaagtctttgaaatttgttgagacttgttgcatagcctagtatatggtcaatttttgttaatattctgtacacatgaaaagaatatgaattttgcattgattacagtttttttctctctctataaaatcttgtttaaatttcctacaattttactgatttattttgcctgcatatatatgtgtgtgtgtgtgtgtgtgtgtgtgtgtgtgtgtgtgtgtgtgtgtatgtttttttcccccttttctttttagagacagggtttcactctgttgcctaagctggagtgcagtggtgcagtcatagctcacagcagccttggcctcctgggctcaagtgatgctcctgtctcagcctcccaagtagctaggactaattatgctcagctaattttattcaaattttttagagattttgtcttgctgtgcttgttacccagactggtcccaaactcctagtcctaagtgatcttcccaccttggctgcatttatatttattattgagagaattattatagatttctgattaaattcattttgaattttcatatttatctggtggactgacctttttatttatcattataaaatgtcattctttatcattagtaatgtgtttgtctgtagtctttctgtattatattttaggtgtatctcttataaacagcatgtagtttatgttttaagaagccagcttcacagtctttatttttaattgtagcatttagacagtttatatttaatacgattactctaattttgggtataaatctactctaattttgggtaaaagcacctttactgatgctttctaacattatcttcactttcttgcctttgtttggattttggaaataatttcatggtttctcctgctaattttgaaacttatgcactgtttccagtcttcttgttggattccctaggaattatgtcttttatactaacatatcaaagtttaaagttagtcagtatcttttccctcatcccagactatttagggaccttaatgcagtaagaacacccttccaattagatattattataatgtattatgctttattgctttttaaacttcataatatattgttgttattttatatagtctttgtttactagacttacccatgcattttaccactttttttcttcttaaagtaaattctttagaatttatctgcagtaagggattgctttgtttttgtctgaaaactttttaaattttgcccttattctttttaacagctttattgagatataagtcacataaccatacaattcacccacttacaatgtataattcagtgatttggggtatgttactttttttttaagttgtggtaaaatatatatggcagaaaatttgtgttttagccattcagtgtacaatttagtgtaaagaatgccatcattgtttaaagatagtttaactgtaagttatggactaaatatttgtctccccagaaaactcatgtgttgaaatcctaacccccaaagtgatggtattaggagatgaggcctttgggaggtgattaggccaagagagtagaccatgaatagaatgagtgcccttataaaagagaacccacagagctctcttgccctctttctatcgtgtggggatacaataagaagtcagtagtctacaacatggaagagagccctcaccagaaatggaccatgctcacaccttgatcttggacttccagcctccaggattatgagaaataaatttctatttataagccacccagtgtatggtacttgttatagcagcctgaactgactaatacactgtgtatagaattctaggttgatagctattttatttccatatactgcagttatgcctttgttagctggcttccattactgctgtttaaaagtcagctgccactctagatatcacttctttatcaataatgtgcccctttcttggcaggctgcttttctctctgtctttcgtggtctttcattgatgttgctatatcttggtgtgtactttttaaataattatcctgcttgggatttcttgagcttcttgaatcagaagtttgaggtcttttgtcagtttaaatattgcctttgtcacaatctctcctctgcttttgaatctttaattaaatatatgttagctctcactctgtctcttaatctcaatgtatgtctgtattttkgtgtttctatgctgctttctggataatttcttcagaatgttcttatatttcagcacttctagtctcctgttcaattcatatatccactattatggattttacattcattttactgtccattttacagctcaggaaactgaggctcagtcaggttgtgtaatatmcctaagattactcagcttgcaagtaaaatagatggcagtcaaaacaagcactgtctaactgcaaaccccaggctcctgactaatgtgtttccagtgagcaatgttttatggtttttagcacatttactttggatacttatgtataagctcatttgtcatttttcaacctatactttaaaaaatttaagatctcaaatttctttttgatttgcagcattttcattgtcttaaccagctttgccaaattcatttccaatttcttttggtctctttctacaaatatatgctaaagatttttcatcgaattttccacaaattcccacaaaagatactgcaacagtgatgaaaacaaagtctttctttgatgctctatagacataagcatgtatttgttttatttttaggtatgatttttatagtatttttcatttttatgtataattgcttttatttttaggtatgataagtcaaaaatgtcatagggagtatcattgccctaagagactctggtaagaaatttatcaaatgaatgttccatacagaaaattttgaaagagtactacagcaaattttcaaggttgaagacactctgtatgagcagggtgatggaattcagccatttctcatttttatttctcacacgtctttgtgttcctgcatctgccttcagggaagtcgtgtctgggagtctagcaaatttaatagacatatgggtcacgacttagcacttatgttatccaagagtttggttttgattcccacatatagaagagtttctgcacattgttataggaaatataacttttaaaaagctgatgtttgtgagctgcttgtgtacaggaagaagaaactaaaaatgtcttatgtttggaaagtcacacaaatcttaaatcatgattaaaagaggaatcagttaaaatggtccctagttatatgggtgtggctgtggtaaatcattacttttaccctcaagaacaaaaccctatatatgtcaaagacctagggaaaagtaagagttttattacctatcaaaaatcagtatttaggagagattcaactgtatttatattcatcatcatagtattttgaagtactcacttcagcatgaaacataggaaattccaattttacagcatttgcgatcgtgcgttttcttgcttaagacaatataacctgcagagtgtaataccttgacatcactgggtcttccaaacaagttgccgtaaaacataaactatgattattgagtcttaaagaaattatttgctcatgggtactcaagtgatttgaaagttgggatctaagaccacgttaatgaacagaatttgctactttgtatcaacttggaaatatatttcttatttaattttgtagaacaaatatacttcctgggataagtggaggatatattaagtaccctctgatgaattttttcagtgtctagttaacttaacgtttaaattttcaatttgaagaaataaactgggaacagtaatgggacaacagggtgctaacccaataaaaaaagtcactttcagtttgttagtgcatatttatgttgcaatgtaagtttcataattaagtagtgaatctaagttaaaattctgtttacagtttttgcaaatttcaccttggagaattgttgagtgaattgtttgcttcatttgaggatgtagaataaattatattttccataaaatgtcaccaacagtgcttatttccaaacaaaaaataattatgtatgtggctaggtctactcactttgtaatacctcttttggggctcttctgtcagaactgaggacacttacagtatctagagccttttctagggaatataacaaaagcttttctccctcttctagcccccacaaattttacatcttgctgccagcgtatctttcaaaataataacaaggtagtcttcttgagtagtttataatggatttctttctatgtttaataaagcaaatgaaacttaatttttaaaaaaactagaggactaaaaattattttcatgagaactaagtaaaatataattgatatttgtattagtccattctcatggtactatgaagaaatacctgagactgggagattcataaagagaagaggtttaactgactcacagttctgcatggctggggaggccttaggaaacttacaatcatggtggaaggtgaagcaaacacatcctttttcacaaggcgacaggagaagaagcgccgagcaaagggggaaaagccccttatataaccatcagatcttgtgagaacccactatcatgagaacagcatggggataactgcccccatgatttgattacctcccactgggctcctctcacgacacgtgggaattatgggaactacaactcaagatgagatttgggtggggacacagccaaccacatcaatatttaaaattgaagtacttcagttttgattagtgtagactaatacaacatgcgaatgtagaggccttttgctcactcttcccactaagaactcaagacctttgaagggtcctgacaacagacatttcagtgataatttaccaagatagcagaactgtttgttgctaaaaatagttatgcaggataaaatgcaatctataattttatgagaacctgtgattctagtttacctccaattactaatatccatatctatgtttgtatattttttaatcaggtgtgttttggactcagaagttattaaaaattcagtcaaatgatgggagtgatgttttgaagattagaatcatgtagctgattcacatgcgttattagaccatgataagaagcacagaggaaatataacaaatgaaatcagccttcttgcctactgattctgcataattttaaaaattaaatttgggtttttgtccatatgcaaatttgtcctaaaaatttccatcttttgaaagcgttttgatacttagaaaaaaaaatttaagacttttctaaatagaatatacaagatggtacaatctgattggataataatgcatcagtgttctaagttaataattgtctaaggcaataattaacatttaaaacatgcagtgacatcatttctgaatttttttctactttctacttatcaaaatgccaaatataattatacacaattactgcttaaagatgatgaaggttttgatttcagaaagttcatcactcttaccttttcacagagaatttaatttgatgatctattaaggcacaacaggtgtctgatttagcatatttgactattttcacaagtcacaatccatctaacaaggacagatgttcccagtagaggtcagtcttgtgttgatagttattgtatcataaaggaaaaactagggattttatgtttaagtccagtatatttgatataggtagtaagccattaattgtggaagaaagaaacttaaagattggtcatctttattgtaacaaaaattactgtgggtaatattttgggtcctttattaccatatgttttcctcaaaaccccagaaagcttaactgcttgctaaatactccctaaaaggaacttaccaatggtagaaatgaacaattatctaaacgtagcaacagataatttgggataaatgtcagattattggatttgaaactgaaaatatttcttgcaaatttcagtttgagaagagaaacacagaggtaggataatttcacgcatcagcccctcaccttagctgtcttctctgcaatatggggacaactgtgcttgttctctttccctcagataaatcttgttttattcctcagactaatgttttggtctataaaccgagaattttataataaatgcggagatggcaatcggagataaagcatatgtttacaagtaatgcctttggagttgttgatgccaaaatacaataagcagtcaaaccagcatagcccaggaaacatctttgaggttactgagatgataaatgactttactgcaggtagatggtgtgatggaaagagcagtgtgttagcagcagtggttctgccaccagatagcttgaggaggctttaatttcccacaccttaaataaacataattaagtaaactgtgtttgctatgcaaatacagtctaaaagcaagactcctagttccttctttcgaactaaattattacccaacggtccttcctattagaatttgtagcaccaatattagttagaaatcagaatatttggattttaacttgtggcactgccagttgggcaagtgaccttgagcaagtcacaacctctctgagatttgtctttttctcagtaaagtgaagggattggatatggaaggaacaaactccagtgttttccaggacaggaagatattagaagttgctgagaatggaggggtcagtggagaaatggagtgtgcagaccttacaataaggtatctgatagaaacaaagtgttgaatgctctatgttggccaaacttatgctttatgtagaggtgggcagacagatgcaggtaagaaaactgggagagaggtgcccagttacaaatgcaaaacttcaactctggtcttctgtccgatgatctggagttcttcccacttcgccacactaagtcttgtcgctgacaggagtgtgtgggcttgatctaagcaaatctctgaaagagagggcttatatttggttccctttatcctccatctatgccccttctttattttttgggtccctttctctttatccactacatccttagttgtgctcaggtgtttcctgagcatgagctttgtaggcgacacatttcaggagctgaaacagcccagaccccacctctcttttcaggctccccactatgatgttgacatttgccctccacagagcttataccaggctgcattatgtttcttcatgaagactagttagctaagcaagtacttagagccctttcattcattcagtttattgtagagccttaatactgcagatgctaggctgggcaatgatgaagggagaaagacggctttaactctgaaggagcctcagcccaatgaggaaagcaatatgtctacgtgtaactctagatgatgaaatcagacccctgtagtgtgcagggtacacagaggagagataatttttccagggcagtggagggatatgcaaggtgttactgaggagctaatattcaagctgaaccctgaagaatgtgtccactagtgaggaaggcagggcagaggcattttctcagaggaaatagcatgaaataggatctggtgacaactagaaatgacttaccattccatgtggtccaggtaatgctaatacttcaatataaagtctgacatggctctctgtaaaggactgagtaataaggggatttcatgaactgtggccaggcaggcagcggacttatttttaagtaaggagttttttggcacctgtcaaataacatctccgagatggcttcctttacatattccaggtcagttgatccagatctcaatgctctttgcaatttttggattcttagtaggttgctgctacaccatggtttctctttccacattttcacagggcattcctgcattagtctgtactgatgagtttacaatggttgcaataattgttggtgttgatgaaccttccttgcactttatgtaaaagagtgatccttttattgccagtttctatttttccatcaacagcctgatattccatgcctctgggtccatactgttccatttcataacatttaatgaatgttagaagtggctctgcaaatgcattgccttaatcttgttgcctgcagtgagatgcttttaatattttctccacatgtgaactcagtgttttcctttaggttttctttaatttccatgtggttaatgtcactactgcagggagcctggatatttatagatttttccctttcactctatcttcaataatttgcttttgcattcagtgaacacatccatcacaataaatggtccttttctcatttgtattgacttgcatttatataaaccagacttcctttttatagtattatcaatgttcatggcaattttcagtagcttggggagctgggtatgagagttggcacagagctgcaagttttcaaatgactcatgtcatgatgcctggtttcaagctttatcattaagtcaagaccaaagttatatgggtttttttccttaattgcctcaatataaaatgagagtattaaataagcatctctaaattattcccaatttcattaaaatgttcttgatttgatagcccttttgtgcactgaaagatgtaaaatattccaattacattgttgactattcatagtcagttcaatgttataaacttgtatagctcctagtagaaataaacagggaactgagttatatacagttcatattgatcattcttagatgctattgctttctgatagctcaatttattttaacagagtctacaatgatgtcattttaaaattattattttaatatttcatttatattcttttaatataagttaattttttcctatcactgtgcatgtcattggtttgcagattgttgggaagaatatcactggcaggacttgtattgctgttctttaggcaaaagcaaactggtcaacctaatcaaactttttctagcttgtggaaggcctctcagaaaatatctttcagaagtagctctgtgtgctcagacccctggaaccagtcattctgctgcaacagaggcctgtgctttcctattgccacccattttcactgctcagtggcctcttcagatattagtgctatttccataattctagttgcatatgcttttttgtttcttacctatgccacttaaatattgtgacattttgggagcacttaaacatttacttcaaaacttcacatctttgtggtatttttctatagtaacttgtggttgttagaaatgctgaaaataaatggtgctgggataactgggtagttaaatgtggaacattgaaactggacccctttctttcaccatatagcaaaatcaactcaagatggattaaggatttaaatataaaacctaaaactataagaatcctagaagaaacccaggaaatacccttctggacatcagacctggcaaaggttttatgatgaagattctaaaagcaattgcaccaaaaccacaaattgacaagagggacctaattaaacaaaagagcttctgcacagcaaaagaaactctaaacagaataaacagacaaccaacagaataggagaaaatatttgcaaactatgcatctgacaaaggtcaaatatccagaatctataagtaacttaaacaaatcaacaagcaaaaaaacaacccattaaaagtaggcaaaggacatgaacactcatcaaaagaagagagatgaatggatgaatggccaataagcatataaaaatgctccacatcactaatcattagagaagtttaaattaaaaccacagtgagataccgctcataccagtcagaatgactattcttaaataaaagtaaaaaaataacatgctggtcaggttgcagagaaaagggaatgcttatacaactgctggtgggaggtaaattagttcagccacagtggaaagcagtttggctatttctcaaagaacttaaaacagaactaccattcaatccagcaatcccattactgggtatatgcccaaaggaatagaaattgttctaccatatagacacatacatgcttatgttcattgcagcactattcgcagtagcaaagacatggactcaacttagatgaccgtcagtgatggactagataaaggaaatgtggttcatatataccacagaatactatgcagccataaaaaagaatgagagatcatgtcctctgctggaagatagatggagctggaggccattaacctaagcaaattaatatgggagcagaaaaccaaataccacatgttctcataagtggaagctaaacattgagtacacatggacacaaaaaagggaacaagagacactgagacctagttgagggtggagggtgggaggagggtgaggattgaaaactacctatggagtactatgctcattttctgggtgatgaagtaatctgtaccccaaactcctatgacatgcagtttacccataaaacaaacctgcacatgtaccccccgaacctaaaataaaagttggaatggcaaaaaaagaaatgctaaaaatatattatttcattatcccaataagctcttacagtaatttttttatctgtgtggcttttttggggggtatatctccagtataatttaaaataatcagttaatttttgttttctggattcagtcatctttactaccatattaaattatttcgaagacatattttttttctccacattttagcatctctgaaactagaatgcatctttcaattaaggatgtatcacagtttaattggaagcattttttttgtagtggtagaaaaattagttgtgtcctagatttaataaaatgtggcattttatttttattttccaaggacagataatggaaggtggttcatttgtttatgctttgagtaagcattcctgagtattctctgagcttcttttctgtcccaatcttttctatgcaagtctatcttctatcttgttcatttatttattcattctctgcaattagtagaagtatttaacagaaggtaaaaacatttgaaatttttttactctsctctcctaaatttctatgcatatgactttatacctggtcaggccaaagaatttttgtgtagcaggggatgggagaaggagaaattatgggaatagtggtgggattaggacttttataacaagaatgcaaagaagaaccagtgttcagcttttaattactgtaggatgtttctaataatgctggcaatgaggaaagcttgactttgtcaggagaaggaaggattttctaaatttctttaaagctcagatatgtagtaaaagaaaaatttctagaatttcttccagagtctcaaggtactggtttatctagaaagaatgatttggattagagcaagtagatgccctccccttttggtctcatggaataagagtccctgttttttccttaaggtccttgcttttccccttcttaggactgtgtctcaaatggggtgaatgtagaaacatcaggaaaggcatggaggagtctgagaacatttgagctagtggtctgctcctctgtcaaagcatgagggagcacacagacattagttggctccacttcaggcttcaggtctgggacacaatcaatagtgagagagcaatgacatggaggtaaccttggagacagctagaaggattgagactgaggatgtgctcctggctctccagggcctgcgcttggtgtgcagggtattgtgtgggtttccatgcctggagcttttctactgcctcagggacctctgaggccaacagatcagaaaaggctgtatcagagtgaagagactgtaatagaaggagcctttaagactagaggccaggatcagtttctagtagtgtttgtcagcattttccaccccaaaccaagtgtgaacagttttactcattgtaactggtccagggagctgagcaacttacctacctgcagtagaatacagtggagattcagagaacatctcttgaatctgaggtctgcctctctctgtctctgtctctctctctctctgtctctcccttactctgtctctgtctccttccaaaaagaataaagtaaatgtcttcacatacctagatgccatctttgggaggagaagagggtagggacagaactctgaaatgcaagtgtatctgtttgggttcaatcagaagatagagaacatacagtaatctgaacaggggaattttaatataaagataactattaatataaatataattactaaacaaaaataaaagagtagctataagatgtaagaaaacacattattgtaccctgtgactgaatgagagtagtcaggaaagacaaactcggaaggagagccctcttcttgaggctggagttcagacctcactggagaacacgagatgcagatctctggatgttagaggagtttccctggtttgcccatgccagagctggtctgtagtcactgggcaagcagaagtaatcctctggagtgcaggtggggcacaggtgagctgcagctggtggctgggtgggtacgcatgtagagagaatggggatgctggtggcaaccctctggggagtggcagttttcagttacccatggctgtgtaagaggagtgtgctgagggtttgggggtaccagtgtaggcaagaggcctagagtgtgcagtatgcagattgtgagggtgtgggaaggtgatcaggagtcctggcctacgctgtaaggtggccaagggactgcaccttctggactaatggctgaggcagaacaccactggagtcctcacacccacaccgctggcccactgtgcagcagcaagaaacagcagaagagtcatttcctccggcattgcccctccagcacctttaactgtgagagtttagtatcatacacactataaaggagaaatgcttaaaggaattctgttcattatcacagagcatgtattgaatggtgaatttggaactgaaaggtggtaagttgataactggcacaataaatctttattcagaagagactaaatcatccaaaagaaattctaacagctggcactcttttaatgggcttccaatgaacagagttgttggattaaccaatgcattctgtatcctccataaaattgtatatagattcatgtccactgtgtggtgttgactcatagccagttggctgtgctctagtataccattgtacctatgtttccataccatttgggagctgtgtttattctccatatgtttatactagttgtattaagtatctatttattccaagtctatttatagtagttgtattagttttctattttctaacatatttttatttctattttataacagataatctgaaaacttagtgacttaaaacaacaataacaacagtggacatttagtctgccacagtttctgcaaatcttgaattctgttttgcataatctgggtagttctgacttgggggtttctcagatgttgcattcgagttactggatgggcctgcagtcatctgaagacttgactgcagttgtaggaaggaattccaaaatggctcactcatgtggttgacaagctgatgagggctgttgccaggagcgtcagtttgttgccatggagatatctccactaactgagtaccctcatgacatgacagttggcttaccccaagttgggtgatcttaaagatagtgaggcagaagccacaatgccttttataacagtctcaagaagtcacgaagtgtcatttctgcaatatcctgttggttacacagctcaccctttttaatgtagaagaggaccacacaaaagtgttaataccaggagaggccactggaagctgtcttggctactggctaccacactaatatctgttattgtaatcacaaaatttaattaaataccataaaaacaattgaaatatgaatataaaagtatttttttataaaaactaagtgctttcaaaaaacttcttaaagtataaaaaaatctgttgtataaaatgaggctaagacaactaagaaattgaggatattttgtaaaaatctggatggattctgctcccaagtaactttgcaagtgacatgaactttttttattccactttaaagaaattaattggtgatgcaaaaagttttggagtaataaatggcttgaatgttaagggaaaaaaatacccaacccagcatgatacccatatactaagcaccattagggagaaattatcttgctgttctaaagagtaatgaagttaatgtcaattcttgagagataacatttgattgaagaacaagtctacaataccacatcataagctattatctacaaaaatggtaataagagcataggtatgaggttttaataaataatattttacaacaatcagtaatatttgcagcaatgcaactagagtaaaaaattgctgttattggcaaattgacaaaagaggttttagaaataaaaaatatattattaatctaactacagtaccaaaaataaatttggaagaatactgaagttttcatctatcatgacagtagagattaaaaaaaaatcaaaaaacaaccacccaagccatggtgcctatatcagttttcaattgtagcttaaccaaaatcaccctaaaatttagtagtttaaataaatggtttatacaacaatcatattattatctctcgggctctctgtgagtcaggaattcagacagagtacagtagggatgatgggttattttcccactgtgtatagagcctcatctaggaagacttgtaggctgggaatgactcaacagttgggggtctggaatcatctggtggaatctacattcacttgtattgcagttgattctgcttatcatttggaattccagctggtcttgctaaagcacatacacatggctcttccatgtgacctctgtgtttgtttgggcttccttacagcagggtgggtgccttacaagaataaacatcactgagaaaaccagaagaaagctgtattgccatttaggaccttgcctttggaagtctcacagctttactccctttgtaggctccatcttgctcagattcaggtggagggaccatatacaccacatcttgataggagggtgggtatcaaagtcacactgtaagatggtcatgcaggatgggaaatactattgtggcagtcttggaaactgcaatctgtgcacatacacacacacacacactgggaacaatcttacttcctaactgtatgaaccttaaggatgaagatatgtaaaggccatatttttaccactgaatatcatgagaaagtgttttagttccattttgaaaagatggaatatgagaagatgagtttatagaattgataaaattcctcgttgatatggtttggctctgtgtgcccatccaaatctcatgttgaattgtgatcctgagtgttggaggaggggcttggtgggaggtgattagatcatggaggcagatttcccccttgctgttctcatgatagtgagttctcatgagacctggttgtttaaaagtgtggcacttccccattctctcactctctgtctcctgctccaccatggtaagtcatgcttgcttccccttcgccttctatcatgactgtaagtttcctgaggcctcccagccatgcttcctgtgcagcctgaagaactatgagtcaatgaaacctcttttcttcataaattaccaagtttcaggtggttctttttagtttagttgagaactaatacagaaagttggtaccagagaagtggggcattgctataaagatacctgaaaatgtggaagtgactttggaactgggtaatgggcagaggttagaagagtttggaaggctcagaagaagacaggaagatgggaaagtttggaacttcctggggacttggtgaatggttatgaccaaaatgctgatagtgatatggacagtgaagtccaggctgaggtggtctcagatggagatgaacttgttgggaactggaataaaggtcactcttgcaatgcttcagcaaagagactggcagcattgtgcccctgctctaaagatcagtggagcggctggagccaagatggcagaataggaacagctccggtctacagctcccagtgtgagcgatgcagaagacaggtgatttctgcatttccatctgaggtactgggttcatctcactagggagtgccagacagtgggcgcaggtcagtgggtgcagcacaccgtgtgcgagctgaagcagggtgaggcattgccttacttgggaagtggaaggggtcagggagttccctttcctagtcaaagaaaggggtgacagatggcacctggaaaagcgggtcacttccaccccaatacagtgcttttcagatgggcttaaaaaatggcacaccaggagattatatcccgcacctggctcggagggtcctacgcccatggagtctcactgaatgctagcacagcagtctgagatcaaacggcaaggtggcagtgaggctgggggaggggagcccgccattgcccaggcttgcttaggtaaacaaagcagccaggaagctcgaactgggtggagcccaccacagctcaaggaggcctgcctgcctctgtaggctccacctctgggggcagggcacagacaaacaaaaagacagcagtaactctgcagacttaaatgtccctgtctgacagctttgaagagagcagtggttctcccagcacgcagctggagatctgagaacgggcagactgcctcctcaagtgggtccctgacccctgacccccgagcagcctaactgggaggtactccccagcaggggcagactgacacttcacacggccgggtactcctctgagacaaaacttccagaggaacgatcagacagcagcattcgcagttcacaaaaatccgctgttctgcagccaccactgctggtacccaggyaaacagggtctggagtggacctctagcagactccaacagacctgcaactgagggtcctgtctgttagaaggaaaactaacaaacagaaaggacatccacaccaaaaacccatctgtacatcaccatcatcaaagaccaaaagtagataaaaccacaaagatggggaaaaaacagagcagaaaaacaggaaactctaaaaagcagagcgcctctcctcctccaaaggaacacagctcctcaccagcaacggaacaaagctgtatggagaatgactttgacgagttgagagaagaaggcttcagacgatcaaactactctgagctacaggaggaaattcaaaccaaaggcaaagaagttgaaaactttgaaaaaaatttagacgaatgtataactagaataaccaatacagagaagtgcttaaaggagctgatggagctgaaagccaaggctcgagaactacgtgaagaatgcagaagcctcaggagcctatgctatcaactggaagaaagggtatcagtgatggaagatgaaataatgaaatgaagtgagaagggaagtttggagaaaaaagaataaaaagaaatgaacaaagcctccaagaaatatgggactatgtgaaaagaccaaatctacgtctgattggtgtacctgaaagtgacagggagaatggaaccaagttggaaaacattctgcaggatattatccaggagaacttccccaatctagcaaggcaggccaacactcaaatttgggaaatgcagagaacgccacaaagatactcctcgagaagagcaactccaagacataattgtcagattcaccaaagttgaaatgaaggagaaaatgttaacggcagccagagagaaaggttgggttacccacaaagggaagcccatcagactaacagcagatctctcggcagaaactctacaagccagaagagagtggggacaaatattcaacattcttaaagaaaagaattttcaacccagaatttcatatccagccaaactaagcttcataagtgaaggagaaataaaatactttacagacaagcaaatgctgagagatttcatcaccaccaggcctgccctaaaagagctcctgaaggaagcactaaacatggagagaaacaaccggtaccagccactgcaaaatcatgccaaattgtaaagaccatcaaggctaggaagaaactgcatcaactaacaagcaaaataaccagctaacatcataatgacaggatcgaattcacacataacaatattaaccttaaatggaaatggactaaatgctccaattaaaagacacagactggcaaattggataaagagtcaagactcatcagtgtgctgtattcaggagacccatctcatgtgcaaagacacacgtaggctcaaaataaagggatggaggaagatctaccaagcaaatggaaagcaaaaaaaagcaagagttgcaatcctagtctctgataaaacagactttaaaccaacaaagatcagaagagacaaagaaggccattacataatgtcaaagggatcaattctaccagaagagctaactatcctaaatatatatgcacccaatacaggagcagccagattcataaagcaagtcctgagtgacctacaaagagacttagactcccacacaataataatgggagactttaacaccccactgtcaacattagacagatccatgagacagaaaattaacaaggatgtccaggaattgaactcagctctgcaccaagcggacccaatagacatctacagaactctccaccccaaatcaaaagaatatacattttttttttcagcaccacaccacacctattccaaaattgaccacatagttggaagtaaagctctcctcagcaaatgtaaaagatcagaaattataacaaactgtctctcagaccacagtgcaatcaaactagaactcaggattaagaaactcactcaaaactgctcaactacatggaaactgagcaacctgctcctgaatgactactgggtacataacgaaatgaaagcagaaataaagatgttatttgataccaatgagaacaaagacacaacataccagaatctctgtgacacattcaaagcagtgtgtagagggaaatttatagcactaaatgcccacaagagaaagcaggaaagatccaaaatttacaccctaacatcacaattaaaagaactagaaaagcaagagcaaacacattcaaaagctagcagaaggcaagaaataactaagatcagagcagacctgaaggaaatagagacacaaaaaacccttcaaaaaattaatgaatccaggagctggttttttgaagagatcaacaaaattgatagaccgctagcaagactaataaagaagaaaagagagaagtatcaaatagatgcaataaaaaatgataaaggggatatcaccaccaatcccacataaatacaaattaccatcagaggatactacaaacacctctacacaaataaactagaaaatctagaagaaatggataaattcctggacacatacaccctcccaagactaaaccaggaagaagttgactctctgaatagaccaataacaggatctgaaattgtggcgataatcaatagcttaccaaccaaaaaaagtccaggaccagatgaattcacagccgaattctaccagaggtacaaggaggaactggtaccattccttctgaaactattccaatcaatagaaaaagagggaatcctccctaactcatttgatgaggccagcatcatcctgataccaaagcctggcagagacacaaccaaaaagagaattttagaccaatatccttgatgaacattgatgcaaaaatcctcaataaagtactggcaaaccaaatccagcagcacatcaaaaagcttatccaccatgatcaagtgggcttcatccctgggatgcaaggctggttcaatatatgcaaatcaataaatgtaatccagcatataaacagaaccaaagacaaaaaccacatgattatctcaatagatgcagaaaaggcctttgatagaattcaacaacccttcatgctaaaaactctcaataaattaggtattgatgggacgtatctcaaaataataagagctatctatgacaaacccacagccaatatcatactgaatgggcaaaaactggaagcattccctttgaaaactggcacaagacagggatgccctctctcaccactcctagtcaacatagtgttggaagttctggccagggcaattaggcaggagaaggaaataaagggtattcaattaggaaaagaggaagtcaaattgtccctgtttgcagatgacatgattgtatatctagaaaaccccatrgtctcagcccaaaatctccttaagctcataagcaacttcagcaaagtctcaggatacaaaatcaatgtacaaaagtcacaagcattcttatacacaaataacagacaaacagagagccaaatcatgagtgaactcccattcacaattgcttcaaagagaataaaatacctaggaatccaacttacaagggacgtgaaggacctcttcaaggagaactataaaccstgctcaatgaaataaaagaggatacaaacaaatggaggaacattccatgctcatgggtaggaagaatcaatatcatgaaaatggctatactgcccaaggtaatttatagattcagtgccatccccatcaagctaccaatgactttcttcacagaattggaaaaaactactttaaagttcatgtggaaccaaaaaagagcccgcattgccaagtcaatcctaagccaaaagaacaaagctggaggcatcacggtacctgacttcaaactatactacaaggctacagtaaccaaaacagcatggtactggtaccaaaacagagatatagatcaatggaacagaacagagccctcagaaataatgccacatatctacaagtatctgatctttgacaaacctgagaaaaacaagcaatggggaaaggattccctatttaataaatggtgctgggaaaactggctaaccatatgtagaaagctgaaactggatcccttccttacagcttatacaaaaattaattcaagatggattaaagacttaaatgctagacctaaaaccataaaaatcctagaagaaaacctaggcattaccattcaggacataggcatgggcaaggacttcatgtctaaaacaccaaaagcaatggcaacaaaagccaaaattgacaaatgggatctaattaaactaaagagcttctgcacagcaaaagaaactaccatcagagtcaacaggcaacctacaaaatgggagaaaatttttgcaacctactcatctgacaaagggctaatatccagaatctacaatgaactcaaacaaatttacaagaaaaaaacaagcgaccccatcaaaaacaaaagccaaaattgacaaatgggatctaattaaactaaagagcttctgcacagcaaaagaaactaccatcagagtcaacaggcaacctacaaaatgggagaaaatttttgcaacctactcatctgacaaagggctaatatccagaatctacaatgaactcaaacaaatttacaagaaaaaaacaagcgaccccatcaaaaacaaaagccaaaattgacaaatgggatctaattaaactaaagagcttctgcacagcaaaagaaactaccatcagagtcaacaggcaacctacaaaatgggagaaaatttttgcaacctactcatctgacaaagggctaatatccagtatctacaatgaactcaaacaaatttacaagaaaaaaacaagcgaccccatcaaaaagtgggtgaaggacatgaacagacacttctcaaaagaagacatttatgcagccaaaaaacacatgaaaaaatgctcaccatcactggccatcagagaaatgcaaatcaaaaccacaatgagataccatctcacaccagttagaatggcgatcattaaaaagtcaggaaacaacaggtgctggggaggatgtggagaaataggaaaagttttatactgttggtggcactgtaaactagttcaaccattgtggaagtcagtgtggcgattcttcagggatctagaactagaaataccatttgacccagccatcccattactgggtatatacccaaaggattataaatcatgctgctataaagacacatgcacatgtatgtttattgcagcactattcacaatagcaaagacttggaaccaacccaaatgtccaacaatgatagactggattaagaaaatgtggcacatatataccatggaatactatgcagccacaaaaaatgatgagttcatgtcctttgtagggacatggatgaaattggaaatcatcattctcagtaaactatcacaagaacgaaaaaccaaacaccgcatattctaactcataggtgggaattgaacaatgagaacacatgaacacagaaaggggaacatcacactctggggactgttgtggggtggagggatgggggagggatagctttaggagatatacctaatgctaaatgatgagttaataggtgcagcacaccagcatggcacatgtatacatatgtaactaacctgcacattatgcacatgtaccctaaaacttaaagtataataataaagtaaaataaaaaaaaaaagaagttttacatataaaaataaatacatatgtaaagatctgtagaattttgaacttgagagagataatttagggtatctggtggaagaaatttctaagcagcaaagcattcaagagatggcctgactgcctctaaaagcctaattcatttgcataaacaaagaaatgacctgaaactagaacttgtatttaaaagggaagcagagcataaaagtttggaaaattttcagccagaccatgcagtagaaaagaaaaacaattttctagggaggaattcagggctgcagaaataagcataagtaacaaggagtcgaatgttaatagcaaaaacaatggggaaaatgcctccaaggcatttcagaggcctttgtggcagcccctccaatcatagtcctggaggtctagcagggaaaaatggtttcatggaccaggcccaagaccccgctgctctctgcagccttgggacatggtgccctgcatcgcagctgctccagttccagctgtggctaaaaggggccaaggtatagcttgggctgtttcttcagagagtgcaagctccaagccttggtggcttccaagtgtattgggcctgtgagtgtgcaaaaggtaagcgttgaggtttgggaacctttgcctagatttcagaggatgtatggaaactcctggatgtccaggcagaagtgtgctgcaggggtggagccctcatggagaccctcttctagggcagtgcagaggggaaatgggaaatgtggggttggagcccccacacagagtccctcctggggcactgcctaatggagctgtgagaacggggccaccatacttcagacctcagaatggcagatccactgacagcttgctctgtgtgcctggaaaagctgtaggcactcaacaccagcctgtgaaagcagccatgggggctgtattatgcagagccacaggggtggagctgcccaaggacttgagcccactgcttgcatcagtataacctggatgtgagacatgaagtcaaaggagataattttgaagctttgagatttaatgactcccctgctgggttttggacttacatggagcctgtagcccctttgttttggtcaatttctttcttttggaatgggagaacttactcaatgcctgtactctcattgtatcttggaagtaactaacttgtttttgattttacaggcttataggcagaagggacttgccttgtctcttcaaagagtctcatctttgtctctcataaaagatgagactttggacctacacttttgagttaatgctagaatgagttaagactgttgggaaggcataattgtgttttgaaatataagaaggatatgtgatttgggaggggccaggacagaattatatggtttggctttgtgtccccacccaaatctcatgtttaattgtgatcttaagtgttggaggtggggccttgtgggaggtaattagatcatgggggctgatttcccccttgccattctcatgagacctggttgtttaaaagtatgtagcacttccccctttgctcactctcctgctccactatggtaagacatgcttgcttcccctttacctctgccatgattataagtttcctgaggcctcccagccatgcttcctgtacagcctgcaggactgtgagtcaattaaaactttcttcttataccatttgatccagcaatctcattactgggtatatacccaaaggattataaatcattctactataaagacacatgcatacgtatgtttattgcaacactatttacaatagcagagacatggaaccaacctaaatgcccatcaatgatagactggataaagaaaatgtggtacacatacaccatggaatactatgcagccataaaaatgaatgagatcatgtcctttgcagggacatggatgaagctagaaggcataatcctcaccaaactaacacaggaacagaaaaccaaatatcgcatgttctcactcataagtgggagttgaacaatgagaacacatggacacagagagcggaaaaacacacatccaggcctgttgggatgtggggggtgaggggagggaacttagaggataggtcaataggtgcagcaaaccaccatggcacatgtgtacctatgtaaggaacctggacattctgcacatgtatcccattttttagaagaaatcaaacaaacaaacaaaaaactcatttccttgtaaattgctcagtctcaggtagttctttatagtaatgtaagaaaagactaacatcaaaggtcactattcacagtgcagtactggagtgaaatgtgttaagaaaaagatttcctaaacttggaaatagccatattggagaaatgtgcaacagatccatcattgatgatttaattatttaaggctgttaactttgatttaacgctattgattgggatatttacaactctatgcatagatggtgacttatgaaaactgagagtggtgcaaataaattcttcccagtagaaaagaacactccaggggatatagttaatgcaagacattaaccagttttatatctcttttagcattttttattcagtcatcttttttcaataactataaatacttctgcttctgctgtattcttttttctcaccttttctattttattggttcccataataatgagttaaataaatctttgatacatgcttactttattttatatgagagtcaggtttttaaaattatactttgacaaatgaaagtcctcagtgaacatgtactacatcttgaaaaaagggatggcctggggctgataatactataaaacaagagttgacagactatggccccatgggtcaaatgcacttgtaagaacgttttattggaacatagacacactcattgattatgtcttgtctatgggttttgttctgctatagcagaattgagtagttgcaactatgatcatatggcccataaggcctaaaatatttattatctggccttttacagaaaaattttgctaaattctgttataggaaatcctgaattttaagactaatcatgaacataatttgttaatcgttctcagaaaattgacagcactaatgatttataagacatcaaacaatagaatatttaatttgatttactagaaaattatgaataatgcagaataatatatactctgaattaaacttattgatctcaatttggaaaacagaaaacaatgaagagatataatcaaatctagagccaaaagtggccaataactacctaaatattaccatatattaaacatcagatggaatcaactgtcaagaatataattaaaaaggtggaaggactatgctgtgaaaaaaatctatcatcttaacaacttgaactcatttttattaaatgtatatacatttagtttaaatgaaaatatagtatttgtgttatatactttatttctcactttgactttttaattaaatatgtcttgatttcatcagataagaaggcatctggtgtattaagttttgttaattgaaaaatctcaacttttttattgcccagcagggtagaggcttgctcagaagcttggactagcaaacataactagctttttttttttttttttgtctttccttctcttttctctcctgccaccttaatgtagggtgaatgaatttgccacctcaaagctatctacaatgggtcaggcaaaataaccacaatatgggtttgtacataatttgggaaggagttcttctcctgtcccttcttcctttggcaatgcctcttaaatcacagttgtgttggttgaacagctctatgaatatatgaaaagccactgaattgtgcacttaattgggtgagttgcatggtatgtaaaatacatcttaataaagctgacaccccaagaaaatcacaggagaaaaaaaatcgtaccgagttaatggtatataatgaaaaagaaaaattgatgttcagtgcctactgtgtactagaaacttacaaatggacagatatatgagtatcaaaatcaaaagtgcacagcaacctaaaacagctctgtcacccaggctgtagtgcaatggcctgatcatggcctattgcagcctttgccaaaggagctcaagggctcctcccaccccagccttcggagtagctgggactacaggcatgcaccaccatgcctgggctaatttttttttttttttttttgtagagatggagttttatcatgttgtccaggctggccttgcactccttgactcaagccatctgcccatctcagcctctcaatgtgctggggttagagggatgagccaccatgtctagcatagagttgtattttctaggtttaaagtaattaaattatggatctgcaagcccaaataatttttataagttataatttttcttattaattataaagtattcccagggactctgtgaagtcctgttatgtctgggctcacgtatgaggcacacaaggcaggcagtaatgagactgcttttaatctgtaaatatataagtaaacattcaaattaattccattattttaaagagtgagattaagaaatgttaaaatgcactcattttaacaatgtttccattgtgcaaaacatttttggcattatttgtctttttcaggcaggaaaaccagtgtcaaaactttataatcatgtcttatttctgtgtgtatgtgtccacataaagtattaattagcatcattgcttgtttccaaatgccttttgtctgtttcaaaactcaaatctaccattaaaggaaaaaaaaattcacacaattgagaatattccaaagaatgggcctaatggggatcacagaactgattggaagactgagactgaagatctaggctcagaaatttggcatgaatcttggcagtaggtgacacagttcaggtcacaccacaaagcaatctggtgtagcatgtctcactggcatggccaccattagactttatcctcactagcaccaattggcaatggagtgttgtaccacttcctttagatgcagtcatcccaggtgggagtgttcgtgcaagccaagcttatgtgccatgcaccagatgtcagtggatgggggtgtgtgaatctgttaggtagcagagcacagtttgccaccaaaatatacacaatgtagcatttccccacaattgcccattaaaaatcttttacattaagcattactgacattatagaagtgtctttggattcttttattagttaaggtgagcatatattacgtttgtaattttaagtcgagtacataataattataaaagagagatttttattctttcaagtttcaggtacagagatagtctctttgcttcgatatagggtacactagagagggttgtacacctcagttcattgctccacactctcccagcagggagcatagaaccttgacctttagaacattccacttaatggtgcaataacctgtatgcagtgtaagctggtaggagaaatcaagtaagaagaggaaagaaatggccataaaatgcccacacatttcctcttcgcccccacccgcccctccaatcataagtgatgctccattgggcactctttacctcaacttaagtttcacctttttctggtttggaaagggaaaactacgtttttttgttttgagacggagtcttgctctgtcacccaggctggagtgcactggtgcgatctcggctcactgcatcctccctcccaggttcaagtgattctcctgcctcagcctcctgagtagctgggattacaggtgcccgccaccacacccggttaatttttgtatttttagtagagacgggatttcaccatgttggccaggatggtcacgaactcctgacctaaggtgatctgccctccttggcctcccaaagtactgggattacaggcgtgagccaccgcgcccatccaaactacatttttaaaaaaagttaaaaagcaaaaacgaaacaaaagttgggaaggcaagtgttctgttccatttcattaggaggctgactctctaggaacctctcctggtcgctgggaccattgttacaaggttgagaactgtgagtgtacggaaacccaggggaaacatttttcctcatttacttctcaaaatagaggtaggaataaggcatggaaaaatataaatgagtaaatataatccttgttaccttggaataattggtgataaagtgcaggtgcatcttattttcattctatcaagtcgttttctaattggatgttcttgaaacagtggctcattgcttgtacttgttcactcctattttcttgctactatcctgttttgggggcagggcaactctaccctggggaacgatcaaatgtttaggcaaatatatcctggtgttataagctcattaaatttcttgtcatttcttgcagtgtgctgggaagtgctgtttgtggcccgtttttgcaatgtagaacctctcttttgtgagagccatggaagttccttatttgataattagtctcttgctttaggcagtgccattaagaactccatataagctgccaacactttgtggatgtgcagaaccccgtaagcttcctatagctactattgcaagtaaaattttcagatgcttctgaagtcttacccacttatcttggcgtagaggttctcaagcttcagcactggaggatcacctggaattgctcgttaagacacacattgctgggatccacctccagggtgtcagagtcaagtctggggtgaagcctgagaatgtgcatgtctaaccagttcccaggtgatgctgatgttgctggttttgagactatattttgagattaagaactgccttggattaagagctgacctgcgatctacagctcaaatagtgaagtaaacatcctaaagaaaatggaaaaaccagtgcagtgagtgattgaattactatttgttcaatatcacagagagcatagtattacataagggctttggggaatattttaggtaagtatatataactcttgccacctaggatgttcatagtaactataagacagtatttttgttttccaagtaattttaatgatcctgtagatcctcttcctttttgtatataatatcaatctaatagtttcttgtttaatataaaaatgaaatcttattttacacaagcagcaagcagctattttttcagattttccccctataatctaagggaaagttattttaaaatagaaaagatgtgggcttcaaaaaaagctttgcaaatatgttgcaataatacgaatgatttcagtgttgaaatccatttgtgaaagcaggctttgcttatattttgggtcctgccttctataaaatgctcagatttgcttttattaagatcatacactcagtgacctgaggaccagatggaggttataagcagctctttaaggcttcagagcttagcctagagagtcaaacagctctttgaactggcgtctcagctctgtcatttaggcaaattgtttattttctgcaaagaaccagccttaggctttgttgatctacgtatgtatatttgttttttatttatttgcattatttcattcattctgttttctttgactttaatttgctagttttctttgaagcttgtgagataaatgcttagatcattgattatcaaaattgtgtctattctaatatatatataatatatatatgataaggctatacattttccccttagcacagctttagtagcctccaacaaattttgatgtgctgtgtttttattataaatcagtttgaaatatatattctaattttattatgatttcttgagcctatggattatatagaaatatatttcttaaattgtaaacatatggggattatttgatgtctctaagccgcagatttcctattttattttatttatttattttttattattatactttaagttttagggtacatgtgcacaatgtgcaggtttgttacatatgtatacatgtgccatgatggtgtgctgcacccattaactcgtcatttagcattaggtatatctcctaatgctatccctcctctctccccctacgccacaacactccctggtgtgtgatgttccccttcctgtgtccatgtgttctcattgttcagttcccacctatgagtgagaacatgcggtgtttggttttttgtccttgcaatagtttgctgagaatgatggtttccagcttcatccatgtccctacaaaggacatgaactcatcattttttatggctgtatagtattccatggtgtatagtattccatggtgtatatgtgccacattttcttaatccagtctatcacttttggacatttggcttggttcgaagtctttgctattgtgaatagtgctgcaataaacatatgtgtgcatgtgtctttatagcagcatgatttataatcctttgggtatatacccagtaatgggatggctgggtcaaatggcatttctagttctagatccttaaggaatcgccacactgatttccacaatggttgaactagtttacagtcccaccaacagtgtgaaagtgtttctatttctccacatcctctccagcacctgttgtttcctgactttttaatgattgccattctaactggtgtgagatggtatctcattgtggttttgatttgcatttctctgatggccagtgatggtgagcattttttcatgtgttttttggctgcataaatgtcttcttttgagaagtgtctgttcatgtccttcgcccactttctgatggggttgtttgtttttttcttgtaaatttgtttgagttcattgtagattgtggatattagccctttgtcagatgagtgggttgcaaaaattttctcccattcagtaggttgcctgttgactctgatggtagtttcttttgctgtgcagaagctctttaattagatctcatttgtctattttggcttttgttgccattgctcttggtgttttagacatgacgtccttgcccatgcctatgtcctgaatggtattgcctaggttttcttctagggcttttatggttttaggtctagcatttaagtctttaatccatcttgaattaatttatgtgtaaggtgtaaggaaggcatccagtttcagctttctacatatggctagcccgttttcccagcaccatttattaaatagggaatcctttccccatttcttgtttttctcaggtttgtcaaagatcagaaagttgtagatatgcagcattatttctgagggctctgttctgttccattggtctatatctctgttttggtaccaataccatgctattttggttactgtagccttgtagtatagtttgaagtcaggtagcatgatgcctccagctttgttcttttggcttaggattgacttggtgatgcaggctcttttttggttccatatgaactttaaagtagttttttccatttctgtgaggaaagtcattggtagctcgatggggatggcattgaatctataaattaccttcggcagtgtggccgttttcacgatatcgattcttcccacccatgagcatggaatgttcttccatttgtttgtatcctcttttatttcattgagcagtggtttgtagttctccttgaagaggtccttcacatcccttgtcagttgaattcctaggtattttattctctttgaagcaattgtgaatgggagttcactgatgatttggctctccgtttgttattggtgtataagaatgcctgtgatttttgcacattgattttgtatcctgagacttttctgaagttgtttatgagcttaaggagattttggtctgagacgatggggttttctagatatacaatcatgtcatctgctaacagggacaatttgacttcctcttttcctaattgaatgccctttatttccttctcctgcctgattgccatggctagaacttccaacactatgttgaataggagtggtgagagagggcatccctctgtcttgtgccagttttcaaagggaatgcttccagtttttgtccattcggtatgatattggctgtgggtttgtcatacatagctcttattattttgagatacgtcccatcaatacctaatttattgagagtttttagcatgaagggttgttgaattctgtcaaaggccttttctgcatctattgagataatcatgtggtttttgtctttgattctgtttatatgctggattacgtttattgattttcatatgttgaaccagccttgcatcccagggatgaagcccacttgatcatggtggataagctttttgatgtgctgcttgattcggtttgccagcattttattgaggatttttgcatcagtgttcatcaaggatattggtgtaaaattctctttttttgttgtgtctctgccaggctttggtatcaggatgatgctggcctcataaaatgagttagggaggatgccctctttttctattgattggaatattttcagaaggaatggtaccagctcctccttgtacctctggtagaattcggctgtgaatgcgtctggtcctggactttttttggttggtaagctattattattgcctcaatatcagagtctgtttttggtcttttcagagattcaacttcttcctgatttagtcttgggagggtgtatgtgtccaggaatttatccatttttttctagattttctagtttatttgtgtagaggtgtttatagtattctctgatggtagtttgtatttatgtgggatcggtggtgatatcccctttgtcattttttattgcatctatttgattcttctctcttttcttctttattagtcttgctagcggtctatcaatttgttgatcttttcaaaaaaccagcctctggattcattgattttttgaagggttttttgtgtcgctatttccttcagttctgctctgatcttagttatttcttgccttctgctagcttttgaatgtgtttgctcttgcttctctagttcttttaattgtgatgttagggtgtcaattttagatctttcctgctttctcttgtgggcatttagtgctataaatttccctctacacactgctttgaatgtgtcacagagattctggtatgttgtgtctttgttcttattggtttcaaagaacatctttatttctgccttcattttgttatgtactcagtagtcattcaggagcaggttgttcagtttccatgtagttgagcggttttgggtgagtttcttaatcctgagttctagtttgattgcactgcggtctgagagacagtttgtcataatttctgttcttttacatttgctgaggagagctttacttccaactatgtggtcaattttggaataggtgtgatgtggtgctgagaagaatgtatattcttttgatttggggtggagagttctgtagatgtctattaggtctgcttggtgcagagctgagttcacttcctgggtatccttgttaactttctgtctcatggatctgtctaatgttgacagtggggtgttaaagtctcccattattattgtgtgggagtcttagtctgtttgtaggtctctaaggacttgttttatgaatctgggtgctcctgtattgggtgcatatatatttaggatagttagcttttcttgttgaattgatccctttaccattatgtaatggccttctttgtctcttttggtctttgttggtttaaagtctgttttatcagagactagggttgcaacctgtgactgtttttgttttccatgtgcttggtagatcttcctccatcccttattttgagcctatgtgtgtctctgcacatgagatgggtctcctgaatacagcacactgatgggtcttgactctttttccaatttgccagtctgtgtcttttaattggagcacttagcccatttacatttaaggttaatattgttatgtgtgaatttgatcctatcattatgatgtcacctggttattttgctcgttagttgatgcagtttcttcctagccttgatggtctttacaatttggcatgtttttgcagtggctggtaccggttgttcctttccatgtttagtgcttccttcaggagctcttttagggcaggactggtggtgacaaaatctctcagcatttgcttatatgtaaagtattttatttctccttcacttatgaagcttagtttggctggatatgaaattctgggttgaaaatccttttctttaagaatgttcaatattggcccccactctcttctgggttgtagagtttctgcagagatatccgctattagtctgatgggcttccctttgtgggtaacccgatgtttgtctctggctacccttaacattttttccttcatttcaactttggtgaatctgacaactatgtgtcttggagttgctcttctcgaggagtatctttgtggcattctctgtatttcctgaatttgaatgttggcctgccttgctagattggggaagttctcctggataatattctgcagagtgctttccaacttggttccattctccccgtcactttcaggtacaccaatgagacgtagatttggtcttttcacatagtctcatatttcttggaggctttgttcatttccttttactcttttttctctaaacttctcaattcatttcattcatttcatcttccattactgataccctttcttccagttgatcgaatcggctactgaagcttgtggatgcatcacttagttctcgtgccatggttttcagctccatcagttcatttaaggacttttctacactggttattctagttagccattcgtctaatctgttttcaaggtttttagcttctttgcgatgtgttcgaacttccttctttagcttggagaagtttgatcatgtgaagccttcttctctcaacttgtcaaagtcaatctccatccagctttgttctattgctggtgaggagctgcattcctttgcagggggagaggtgctgtgatttttagaattttcagcttttctgctctgttttttccccatctttgtggttttatttacctttggtctttgatgatggttacgtacagatgggggttttgttgtggatgtcctttctgtttgttagttttccttttaacagtgaggaccctcagcggcaggtctgttggagtttgctggaggtccactctggaccctgtttgcctgatattaccagcagaggctgcagaacagcgaatattgctgaacagcgaatattcctgaacagcaaatattgctgtctggtagttcctctggaagcctcatctcaggtgggtacctggccatgtgaggtgtcagtctgtccctacttgggggtgcctcccagttaggctacttgggtgtcagggacccacttgaggatgcagtctgtccgttctcagatctcagactccttgctgggagaaccactactctcttcaaagctgtcagacagggacatttaagtctgcagaggtttctgctgccttttgtttggctatgccctgcccccagagttggagtctatagacgcaggcaggcctccttgagctgagatgggctccacccagttcgagcttcccagccactttgtttacctactcaagcctcagcaatggtggggcgcccctcccccaaccttgctgctgccttgcagttcgatctcagactgctgtgctagcaatgagcgaggctccgtgggcgtgggactctccgagccaggckcgggatataatctcctgatatgccgtttgctaagaccattggaaaagtgcagtattagagtcggagtgacctgattttccaggtgccgtctgtcacagcttcgcttggctaggaaagggaattccctgaccccttgtgcttcgcaggtgaggcgatgcctcaccctgcttcagctcacactcggtgcactgcacccactgtcctgcaccctgcagtgtagcaaagtttgaaatgtagatagccagaagtcagtctgggggaaagcaattccaattttcaagcttgtaaaattgttttcattgatttctactcaaatttgaaattctttcctgtcgtcaacatgtttgatgatgcctaatatgagctacaaattcactataccatttttttcttttttgctggaacatgtataaaatagaatatatctgaatttccatgtagggctgaaacatgctgtcataatagaaacaatatgcctacatctccgtctctctttctgtgtgtgtgtgtatgtatgtgtgaagtcatatgttttatgctttcctatatatcagattatgttttagcatttcagaggcactgtgtcctgctaaaatcctgtgtttccagatgaaatggcaaacattatttccagcaatgtgataaaacaaccaaagaaagtgttcaagtgacccgattcataaaattcaccaataagtcaatatatgcagtaaaatagttattacaagagtagctaagagtaattaatatgagtaagtctgtagcttaacacagtaaagtatcacttttaaatgcatttgcatttctcatgggtgagggttagcaaattctgacctggaaaccaaatccagcctactgttttatttgtaaaaaattacatttgaacacagtcctacccatttattaacttactgtttatcactgcttttgttctagaaaagcagagttgagtagttgaaaaaaagactgtggccaggcacaatgtctcataccataatcccagcactttgggaggccaaggtggatcactaactggtcactaactcttgggctcaagtgggtggattactttagcccaggtgttagtgaccagcctgggccacatggtgaaaccctgtttctacaaaaagtacaaaaattagccgggagtggtggtgtgaacctgtagtcccagctactggggaggctgaggtgggaggatgacctgagcctgggaggtcaagtaaggctgcagtgaactgagatcatgccactgcactccagcctgagtgacaaagtgagatcctatctccaaaaaaaagaaaaaaaaaaagactgtaatataagacccccaatgtcaaaaatatttactatctgatcctttacaaaagcgtttgctaactcctgtccttgtgtatgctttgatttcatattaattatatcttatgttatttatgatacatatatgasatacacatatatatctaatatgttatatatttaagaattattcactatgccacaaactgtagatacaaaagaagtatctctagggaaagccaaaaacaaacatggaaagaaagaaggctagcagaagcttcaaaatatcaaaaactctcttactgtgtggcaatataaactaaaaactgatgctcaaaatcatgaagataggaaaaagaatcaagacaaccaaaaaatatggttaataaaaatgaagacagaagacatcaagatgtttatgagaaccagggtcctttcaaacagggggtgaaaaaggagtgagaagatgtgcatggcagtgaagaagaacttaatttgcacacagtcaacgggggggtgggcaggagggccaacacagctgcatttctaccacattatttattttggtaagtactgtcatcttttgttatgagccatatttcattcaacagtgtttaatgacttttttccaaatcattactccataatatttactgagaatcaaacagaacttacaatagaaaaaagagatacttcttaattagatattttggaaaaaaatcattgtcgtgtgacaagacaaccaaagagtagtcagctaaacctatagaaatgaagtattctaaaaatgtgtcagacagctaattaacacaatattttatttttctaaagatcttgcagtgtttgtcatctttatcaccttttaaaagtttgcattttattgtcacttttaaaatttttaaataaatgtccattttgtatctatcattctgtgtctttatgtaatagtatctaatattctatatctgtatcaaatattctgtatgtacttcatattcattttatcttattttatttatttatttatttatttatttatttatttattttagacagagtcttactctgtcttccaggctggagtgcagtagcacaatcttggctcaccacaacctccacctcccgggttcaagcaattaccctgcctcagcctcctgagtagctggggttacaggcacacgctaccatgtccaggtaatttttgtatttttagtagagatgggttttgccatgttgaccaggctggtctcaaactcctgacctcaagtgatctgccccccttggcttcccaaagtgctggaattacagatatgagccaccacatccagccccattttaccttaatttgtaagaatatataattatatttataattttattcattttatattaatttttctatttcttaaaggctaaatctctagtttcctttttatttttcaggtagaggattttaattcactgagtacctgatcattttacatacctagtcaaataaatatgaaatttgaagaactaagattaagttttaaaaattcttaagtgcatacaatccattgaagaaaacaaaaattgcttaagcagtttttaaaaccttgataagaggtcatcaacatgatttaaatgtgaaattagctaatgtaagtagcagttagaatgagatttagcttatatatttggaggtataatggaaaactctggtgaggactcttttattgcacaccaagagaaacatgagaaagaaaaatgagttgcatttttctgcatttttccagaagtgaaatgctttgcaacatcctcagaaagaaagagaatacatgagtaatatgaaagaaaactatataaaggatttaattatttccaaattgcctgggtgtttttttagtgcctgctttttttttcaagcaggaataactgtagaaacttttatttatttatttttaaaggaatggttactattcttaggaaaagtggcagtaaatatagttaataacggtaattataattttataaactcattcaaaagtcttgattttaaaggcgatagtaaaaaaaatatatatctatttatcttgttccctgaaaaatggtagcactcctgaccactgagagactgttctcctcggcataattgatggccttcaaagccatcatacttcagtattcaatgtcaaagatttatttccatttgcaaaatttgcttagaactcacctatatttacctttcctcttatgacttataagataatattaacatctacataacagaatctcactcacagaatgtttgagccacgaaggtgctctgagaccctctgcctcaacagcctcattcatagatgagagaagcccagagaggtgaggacgccttccaaagctctagcacttgtttctagacatggaaccaggacagcccttggcatttcccaccacattttcctgcttattatgtggcatgagcttgtctttaacactgaattagaattattgcacattacattgcattcatcaaggcctacccttcaggcagtctgatgtaacagtctattataagacatccgagaaaaaccatccactatcctttcagatgttctcaaaacaatttgtattaagagctaataaaatgaaacagaaaatgccaggtaaactttttaaaataaagattttgtgattcattgggtttaattattggttttattttagcattactttgatacatttcatgaagtatacagacagaactaaagccacatttaaaaggcaattaataaaacccagacattatgatataatttacatacatttagatatatttaaagtgtacagttcatttatttagtataaccacagagttgtgcaaacatcaccaccatctaattctagaacatgttagaaccccaaaagaaacttcatattcattagcatgttgcattcctggcagctccctcttgccaccctgtaccctcagtcctaggcaaccactaaacaactttctgtcctcatagacttgtctattctagacatttcctataaatggcatcatacgatatgtggtattttgtgactggctctggcttctttcacttagtataatgctttcacatttatcatgtagcatttgtaagtgtctttcccttttatagctgagtaatattccattgtatgtgtattccacatctttatttatccattcatcacttgatgaatatttggatggttttcactttttggctactatgaacaatgctgccatgaacatttgtgaacaagttttagtgtggcattatgtttccatttcttttgggtacatatctagaaatagaattactgggtcatagggtgactctatgtttaatattttgaggaattcccagactgtttgcaaagtgactgcatcatcttacaatctcaccagtaagtatggcatgaggattccaatttcttcacagccttgtaaaaaggaaaattttacaattataattatttggcaaaaattcaatgaattttttgagcatctattttgtgaaaggtcttttttgaggtgctataattttttaacactatcaatttttgtggaaaaaattagaacttttctaaaggacattatttttaaagtttattacttattatttattaatttttattaatacataatattgctatgtatcaggtacatgtgatagtttgatacatgcatacagtatataatgatcaaatcagcatatttagaaaatccattacctcaagcatttatttctttgtgtttggaacatttcagaacttctctttcagctattttgaaatatgcaatatattttttgttaactatagacactctattgtgctattaaacactagaacttatttcttccacataactgtatgtttgtacccattaaccaatctgtcctcatccccccagccctttcccagcctctggtatctatcattctattccctacctccatgaggtcaactttttagctcccacatatgagtgggaacatgtgatacttgtttttctgtgcctggtttatttcactaaacataatgacttgcaattccatccctgttgccgcatatgatgagatttcatttttaatggctgaatagtattttgttgtgtatatataccatattttctttattcattcatctgttgatggacacttaggttgatttcataccttggctgttgtgaatagagcagcaataaatatgggggtacagttgtccctttgatttattgatttcctttcctttggacagagagacagtagtgggattgctgggtcagatggtagttctatttttagtttttaaagacactttcatactgttttccatagtcgttgtactaatctacattcccaacaatgcataaagagttcccttttctccacataatcaccagcatgtgttattttttgactttgataataaccattctaactggggtgagatggtatctcattgtggttttgatctgtattttcctgatgatccgtgatgttgagcagtttttcctaaacctgttagccatttgtctttttagaaatgtctattcatgtcctttgctcactttttagtgagattatttgattctttgctgtcgaattgttttgagttctatgtatattctggatattagtcccttgttggatgaatagttagcaattttttctccattgttcatgttatctcttcactctgttgattgtttcctttcctgcgcagaagctttttagtttaatgtcgttccatttgtctatttttgttttggttgcccctgcttttgagatcttagccataaaatctttgcctagatcaatatcttgaagcatttcctctatgttttcttttagtagttttatagtttcaggtcttgtatttaagtctttaatccattttgaattgatttttatacattgtgagagatagaggtctagtttcattcttctgcatgtgaatatccagttttcttagcacaatttattgaaaagaatgtcctttcctcagtgtatgttcctggcaactttgtcaaaaattggctggctgtaaatatgtgaatttatttctggattctctgttctgttccactggtctgtgtatctgtttttataccaatagcatagtgttttggttgctatagctttgtagtatattctgaaatgtgttagtgtgattgccttcagctttgttctttttgctgagtattgctgctatttgggctcttctatggttctatgtgaattctaggattgttttttctattgattcaaagaatgtcattagtatcttgataggaattgcattaaatctatagcttaccttgggtagtatagtcatttttaacaatattaattgttccaattcatgagcataatatgtctttctatttttggtatcctcttcaattttgttcatcagggtgtagtgttttttgttttgttttgttttggctttcatagaaatctttcacctccttggctaaatttatccctgagacttttttgaagttataaatgaggttgctttcttggtttctttttcagatagttggttattggtgtataaaaacacaaccgattttttatattgattttgtgtcttgtaacattactgaatttgtaaaatcatgtcatctgaagtagagacaatttggcttcttccttttttttttttttgaattggaatctctctctgtcatccaggctggagtgctctggtgtgatcttgactcactgcatcctctatttcccaggctcaagtgatcctcccacctcagcctcctgagtagttgggactacaggtgtgtgccaccacacctggctaatttttgtatttttcatagagacagggtttcatcatgttgtctagtctggatttgaactcctgggttcaagcaatctgcccacctcagcctcccgaagtgctgggattacaggcttgagccaccacaactggctggcatcctgttttccagtttggatgcctttcatttctttctctttccggaaagagaaagtctggctaggacttccagtataatgccgaataagagtgcttagagtaggtgtccttgtcttattctagttcttagaggaaaggctttcagttattccccattcagtatgatgttagctgtgggctcgtcatatatggcctttattatgtcaaggtatgttcctgctatacctaatttgttgagagtgttcatcatgaagggcagggtgaaagggattcttttctgaaggaggttgtgtcactcagtgtctgatgaggatatagaagtcagtgtttggtgagagatagtaatttgaagagggaacatttactataaagaattattaactggcaaaatgtgataaactacaaaaggggtaaattgtatgctaaataacacagaaatagcaaacatagggaagagctgctacttctaggactgagggaggatacccaagaaaagaacaaacatggaagggtctttcacacctwaaggctgagattcagaccttgttggagagggtggtgctgtggcccgcaggatagaaaagttctttgaggtgccacaggccaggcctggtgagtagggtactggctgttgggtgccagtggatcagcactgtggtcaaaaaagtgccttctagggtgctggaaaaacccactggaaggtggtcaccattgggtctcctgcatactgctggcaaggaaattgcctgctcgggtgacaataaaactcagtaggaagccctcactaggtgctggtggaactcactgtagggtgactctcccatacaccactggtggcggccacaggtaacaagaaccaggaagaatcaagaaggaatgctcctttatttgctataccttgttttattttattttatttatttatttttttgagacagagttttgccttttttccctggctggagtgcaatgatgcgatcttggctcactgcaacctccacctcccaggttcaagtgattctcctgcctcagcctcccgagtagctgggattacaggtgcgtgctaattttgtattttcagtagagatggggttttaccatgttgtccaggctggtctcaaactcctggcctcaggtgatcctcctgcctctgcctcccaaagggctgtgattacaggcatgagacaccgcatctgacccctttactataccttgtagtgtctcccctacactctaccagcaacagatgacattgcactggctgaccgaggagccagattagtatcgtggaacagggcaaagaagggtggatttggagcggagaggcaatatattgataactgtcttggtgaactcctttggcttcttagcttccacatgcaccattttatatatatatttgaactctgtataacacaaagtcaactctgttcttcagagaaatgcagagttctcacccctttccccaaatgaggagacacacagttccaacagttatcgtagtctcatctggctgtcttaaatactcctcaaatcaaagtcccactgaatattctcttacctaaaggctaaattgtagagtttatattcaacaactttcataaaataatgaagagagaaaaaggaaaatggttaatatatacaaatacacacatatacatcacatgcaaagaggaaatacacaaaactgtcagaattctcagttttgtaattgattgagaggccatagttggtatctatggcttccttcttctactgcctattctgtatttccattgcccttaaatggtcaaggttctttatctggggagtgatccaaactttcatttctcaacagcctgaatcctcaataatcctgccccctccttttgactcctgcggtttcccattaacctttatttcacaccttgagtccaggttccagggagttagctaatattggagatgacgcatctggtcgtaggcaggtgtctggtgagatggctgtttttccctttggtcctggtccttggacctcatacattgctgttgagccattgcttgtttctgtctacatggcatatttacctcaggaggctctttccactatcttcatgtgatacttgagggagctgcatcatcacagtttcttgcttctccaaaacgctggggtggagggggaagggcagtggggtgggggaagagggatccagaatccctgcacggactcctctggctggatgccagatgcagccactctcttccccatctctgtgctccttttctgggtggtggtagggtgaggtgggaaattactttcttgttggtcttggatactttgcaaagacatcagtacattttgttagctttaaaggtttagttcttagcactttgccatcctgggaaatcaatgccagcaaatcccatagaacttgtctgctttttgcttcaatttacccgtccctgaagacaataaacaaagagatggcattctgcttataaaagggtagtatagtaaaaaatgaagaaaatatatctcacaactcatttcccatcttttaataaatagtgatagacttaaaatagctaagattgaaaatgatgcctatttgaaaatttactaagtaattacattctagcagttatacatgagatatttattatatatcacatgtactataaatctaattatctgtggtataaatagacattcctaatcacttccttttaagcattttctcttgaactttcgacatttgaattggattcagaacacggaacaagcacaactcttaaaagtgtcagacatgctagatttctttctcgctcccatggaaaaagtaaacacagcataaaacactcatcaatttttagaagttaagaatgtgctttatgtagtttatcctagaaaaatcctcaagttatataaacttttagattatgaatgagttatggtcatttggagatggcaacagagcaactggcaggttcaagaatttatacacaaaggtgaaaggctttttgaaacaatcagagttttctttcaagtctaacttcctgagtaatttatctgagaaattgtgagatgacatgcaggaggactttcaaaatcatcccagtgtccctcaatcaatctggttcaaatatgcagaattggaggacaggtcaagaaagcagacgctgaaacaggaggaaatgaagtcggcttattgtgaacatgactttttcccatctaaaaaaagatgatagtttacattgttttgagaattgtggagtgggagaagcagaccaacctttcatactgctgaaatataattttcctggccacacatcttcctcattaattgtctccaattccttacaaaagaaaaaaaaaaccttcctacatttttttctattataaaataatttcatagttgtatttaccaaatgtttaagcatgaatgtggtaactggtgaaaacagcttaatctgtggtggcatgaaatgatgaaaaaataaatatattttctcttttttttttctgtttttattctccatccacatcaactgaagggtagctagatggttttgtgcagaagtctgagtgtcccttgtgccaggagatgcttttgttacctagatctgtgcttctggagctacttcactggattgatgtttagggaggactagaaagttgaaggggagaagttgaatcatggaggatgttggagtgctaagatccctgaatgtggtacctgtagataaatacagtgactttgagacgcagagcaaagactccagtggagtctgttattcagtgagcaacagcgtcacccaccatggaataaatcaggttggggtggacaatgtatttcaaggttctgtgattaaagattgtgggacacaccagcggcccttccataaatagatttcacaagcctcagccttcttatgttggtgggtggggtagatggtggccagagaatgactgagattgggttttctgtcaactcgaatgggagaggctccttcagttggaattagatatgtaaaaggtaaagaaatgtgttatttcatgtacctgtggattgtgaaacaaattcatgctcactacatttgtttcaaaagcataaataggccctgccttctgcctttatctactctacacgtatagtatggaacagtatgattaagccagtatgatttgagccagaagattaagttccataaaaagtgaagaaaagtcaacaatttaacacaagaaatgtttaccgactaactattctatgccaggtctgggagtatgaggaaataaatgtgacatatcccttgagaaagcagaaataatccaaagaattcatacatatacaaattattaattacatcagtaaaaatctttatgatgggtgtggccaggtctggggctggaaggcccacctcagcattgcaaaagaattagtcttcagtcctgaagctcacagaatttgctaacctattacttagggggaatatacccctgaatatcattacttgaagaaaaaatacacatttcctttggaagaaagtaaaatcagaaatcttgagggttctctcgaagaaaatcagacctgtagttctaaccagtcaactgaccttagttgagaatgttaatgtgccagagaaacaaatgaatgctcacctttccgaggaagacagtagaaaataacccgcttgactatcttcagctggaaaaaagaactctttttttttttttttctgtgacggagtttcactcttgttgcccagcctggagtgcaatggcacaatctcagctcactgcaacctctgcctcccgggttcaggcaattctcctgcctcagcctcccgagtggctgggattacaggcgtgcaccaccacgcccggctaatttttgcatttttcagtagagacaggctttcaccatgttagtcaggctggtctcgaactcctgacctcagatgatccacccaccgcagcctcccaaaatgctgggattacaggcgtgagccaccgtgcccattcgaaaaaagaactctttaatccactatacctaaccttttactctctcctttagatttaaatgattaacttctgataatgctgcagacatttttttttctgaaagatttgttaatgaatggattccttttgaaagaagtccaggcaagagcacagaaaaacagagagttccaatgatgaccaactgtgaaacatactatgctatataagaatcctctagagatgtaactgtaacaccaagatcaaagcacaggggactgtatcaatgcatttccctgcagaagataggactctataaagtgaagggcaagtagcatgtggaagaggaaggacactgggaagagccctaactgctgacgggagagcctagtccagctctggtccttcactggtcactgtgagatcttaggcaaatcacttgcttttctgggccttcattttctcatctggaactgaggtaatcgaattagacccttctttaagtcctaagattccaaaatctccaatgcaggcacatattaatattgtaccaggtagcctttgtcctacattgaattgtaggtatagtttgtgcatatttgtctcccatccaaaagtctgcagattcactaaggaagtcagttaagggccaatcgggggatttgaaggattcagagctacaggagctattctttattcctgggtaactctaagccagaagatggagaagctcacctaaaagctctgccatcaggtgtgtgggtggtgttgtactatggtgtggagagaggagaatgtctcaggagaccaggtaagggttcctatgattgcagaaccaaccaaagagccttggaggcaccaatgatgatgattttctctagttcttcaaaagccaggaactgggccatattgttttctttgaaagaaaagaaaaataagtgaaaatgcttcacagaatattttatagcaacacacttctctggattaattaatagttttagaagatggaggtaaagagctcatctgtataaaggtctgaagatgcacatatcatcttggaaaaaaagaggctgttattccatcatttccacatacacggttttgttacaaatataattgaaaattcaagtctttcaaaaatagaatacatgggtactggagattaggtcacacataatcaaattctaaatttcttttccagcaaagtcgtccctactgaggtcagagtacaaagaagaggggatggtaggctaaacgccaaatgaatgaaaagggaagatttttcaggcagggagtcattagtcttgtcacatgctgctgatatgaaaggactgaccactggattgagcaacatgaaggcatgtgacctcaatacaagctttttctgtggttggaatgagataaaagagaacagggagagaagtggagtcaccaagtgaggacaactctttgaaggaggtttgtggaccatttgttgttatacagagggaaatgcacaggggattttatgatgagggaacagctctgtttaagaactgggtgtaattgcttttgagtccacagagagtcaaggttctctgtgatttaattattcaggaaagaggcttcctagaaagtttacactttcttcaaagaaagtcagtttctctcatttgcatgtctctcatttctaagtgacttaatgaaaattcctttccccactaacttgagttttatataccttgtatggagtagacataagaagtgctggttggcctgrtttggtgcaggacaggatcccacaaaaagaaatttcagccttstaacctttcttcctttgactttctgtgattagtttccttagtgtctggtaacagctctggttcctttgctgtagtgtggtgagcctcatctcttcaaacaaattggttcacaggctgggggatggtgggcgggagggatgaaatcattgttttgcttcaatgtcggttctcccctgagaggtctttcacagcaagggagtctgtatttttagaattagcatgttctgtttcaatgttgtgaacattcattttaaacctactatatttagcagaggtttaattacccaaattgggaaactagttttaaaccgtcaccttctacttggttaatcaaaacagtccctaccaccagcaggggagactggcaatttcagtcatacagccacacctggtgagggcaactgacaaaagcaattccattgcctgagttcagcatcttcagcacccatccagccctgttgtagcccctctttctttcagtaagactttcctgcaatataccctctgtggactagggctggggggatgtgtctgctctgatgtctgtggggagtgtcttttcttcccacacaaaaatcgtgattatattttccaaaatagcactcaggaaacaatctctctgtggcatttacagatatgtgagatgttgaggaactgcggtctgaatgatgaaatttcttggatttttcagcaatgtcattttttccttcatttactcactcacttctggaagggccagtctgagagctgggctgaggagtccaaggctgatgcagtcatggatgagtctgaggcagggagaccactagcaggagaatgggcagtgccaactggctttaaaaatactcagatacaaatatgaattttgcacatccatttagtcatttggcaaatatttattgattggttgtgggataagccatagagcctgacactagtttagtgagagagatacacaggaataggaaaaaaattatcataataaatgcacagctacagagcgagagctctgaaggatcattttatgagtatgcgtaacaggaacctgatgtgattgatcagtgaagcaaattggtgcttgaactgagatccacagtggtgcttcccaaattttatgtgcatatgaatatctggggatcttgttaaatgcagattcctgtgctgcttctggggcttggggaggagcctaaaattctgcatctctaataagctgccatgtgatgctgatgctgctggtaccaaagattctaaaggacaaacataacggaaagcaggggttgggggaaataagtttcacagggagggaacagttatacacagcaagaacatagtctgcatggtgctcttctggtccctaaccactgaagcaaaggtcaagtaattgttctaccttcttccatgactaattggcaggatatatgttcccctgataggacatttcccaactttaaggctgctctttatgtttacttcaaaattccttttacctcttgtaaatattgggatttccatttaaaaggtcagacaaaagatatgtcttctacccttctccttagaatttgccagaaaacagggacagaaatatgaatttcatatttgataaaccttgaagactaactcccaaaagataatatttggagaggctctcaatgcagtgaagatcaaatatgggtgcacaaaggctcctggagggagtgcttgggaacacaggtctcagataaagctggcaggaaactgttttcttaagtagatggcactttgagggcaaaaccaaccaccccttcttcggaatcacaggaaaggcaggtacatggagggtagggttggagcatccctttaccgcatttgacctcacaggaaagtggagcaagcagaactgcagaaaatgtgcagaaatgctgcaatcagtctgtgtcctagtgaggcagggtggaggagagaggctgaattgcctcctgctctgtagctgccaatgcctgttggctggagagaggtaaaaattcaaacaacccgcacatatagtcttgtcatcatgagtttgtccctgaaccagggagaattcttgctagcctggaactgctcatccccttctcaacaagaccctggatcacttccaacatcaggaagaacacacttcatttaaagatgagtaacaaaaaggcaactagcacaggatctatacaaataarttacaagacaaaaggaggaagaggacaggggaacataaagaatcctcaccaataacaagttgccattaagtagaaaattatgacaaaataaatgtctatgaacaatgaatttaatgaaacaatgaagaggctggaagcagagcaattgagagatcaggggaaatactagcaccaccacaggaggaaatgaaacaagaacttctgaaggtcaggaaggaagcagaagagaaaaataaagctaccatggaaatgcaagcatactgtaataaacactaagaagaaacactgctgacatcacagtgaggaataggagggcaacattaagacacataaacaaaagatataagcaaaataaccagaaatgaacaaagttagagtgaactagagagaacatgaaagatacagaaaacaaaagaattgcaacatatgcattatttgtatcttttaagaagaagtctggagatattactcagtaaaactctttagaaataaaataagacttgaatctacaaatggaaagggcatactgtagctcagaaaaaattgatacagaatgatcaacattgagaggtatccaagtaaacatactggccctcaaggccaatgaaaaattttagaatccaggcaaaaataaaaaataagagtgaaaaattaagttggcatgataacaaaatagactatgtagtggaatatcaaaagtaagagaaaggaatcctaacataaatgagagtacaacatttcaacatattaccataaaaagtttaaattgtctaattcacctattgactcaaatttacaaaaaagggaaatcaaattatttgtaatatgtgagatgcatctaaaacaacgaaactcagaaaggataataaagataaaaattaggcaaagacatgcaaagcaaatgcaaaaaaaaaaaagagcagctgtcataactatggttgcattcaaaacaaaaaacatgaaataagacaaaaggggaacttgataataataaaggatgtaactcacaatgcagttcaatatgataaataaattggcatggaaaacatggtgtcaaagctacagaaaataggaataggcagaaatcctttagcagtagaaaactttaacgcttatcttttaactatggagaaatcatatggaaaaaaagcaaggatagttttaatagctttacaacaaactatatactatgaagacagattacactttcctttcaagtattaatggagcagttacaaaaattaactacatatgaagccacaaagaaaactgcaatgcagtcgatcacatagaaatagtacagacattatgtcatgccaacgcaaaacttcaaatgttaaagagagaaaaaaaaataactttacctcctggaaattaaagaacactctctatataatttttcagtctcatagagaaagtcatcgctaaaaatgcagaatatttggaaagcaacacgaattaaaacactatattagagactatgagatcttgttacagcagtacttagaggaaagttcataactttaaatacttgtaacaaataagaattaaatgaattaagcatccaatatcagaatgtattaagtaaaataaagacaaggcagaatagaaattagtaaagataaaaacagaaattaattaatttggaaaatttaaaaaatgccaaaataaagtctatgagttgtgtttgaaaaatttttaagtaaaaatgtgtgctatgctctttttttgaaatgataactttttaattgtggttaaaaatataaacctaaatttgctattttagctatttaaaaatatacaaatcaatggcattaattatatgcaaatgttgtacaatcatcaccagtactgatttctgaactttttcatcaccccagcaactctgtgtcctctaagcagtaactccccattctccctaccccctagcccctggtaaccttcagtctacattttgtgtctatgaagcctattctagatgtttcatataagtggaataatataatatttgtcattttttgtttggcttatttcacttagcatgtatcagaacttcattcctttttatgtatgaataatattctgttgtacataacataccacattctgtttatacaattgattttgttatgtgctcttggatggttctaccttttagctattgtgaataatggtgcaacacccatcttttttttaaagggaaaaagcagaaatagatgatataagaaaacaagaattgagaaataattatagatagagaaaattaaaggagattataggacttatatgtaccataagcaaataaatgtaaaaacctggataaaatatgtaatttctagaaacgataaagttctaaggctggccccagaagagttcgaaaatctaaagagaccaattacaatagaaaaaacaggaaagtcaggctatccgtcttccaaactaccaggcacagatatttttacaggtgagctcttcataaccttaatgactcaatcactctaaagcttttaaaattcttctagaagaaaagactctagttactttttataaagtggaggttacactggtgtcagtatgccacagaacaacaaaaataataaaaagaaagtctaatgtctcttgtgactatcaatacaaacatcttcaatagaatactagcaaacatattccaggaggacagtagaatgtccttcctttcaggaaaggaaggatagtttaatattaggaaatctattgatattgtttaacatcctagtatatgtaaaaaacagtaaaaccatatgcccgcactcatggttgctgaaaatgtttgctataaaattaaaatccattattgattatgaaaaaacacctcatcaaatagaactaaatttatcacattagtaaaatatatttgtcttacctcaaaagccaggtcatgtttaactagcaaaccatacactcacattaaattgggacaaagatgccattaccacaacattattgaacattggtcttgaggtgctaacaaacttttagataagataaagaagagtggtatgtacaagttggaaaggaggaggtaagataatcatatttgcaaataatgtaactctgtgccttgaaaacccaagaaaattaactgaaagatcactgccaacaatagtaaaagaaaaaaaaaataagagaattgagtagtgtggctagaatagtctttacacacataaacaacaattggtgctaagatatgcaagaaaggactgtatgcccagagaagctaattctacagattatatggaaaaatgaaaaaagcaagaatagctaggaaacatcttgaatcagaatagtaatgagaagcatgaatgctctgatgaacacatattatagagttataatcgttacagcactatggtagtggtgcacagatagctacatcaatggaacagaggagaaaattcatttttttttgcagatcacagtaaaaaatagcttgaaaaaccactttcctatgtatgtcatatgtaaattttacataaaaatacatgcacgtatatacttgcatatacatagaacagctttggaagtatattcaagaaatgtaacagttgttgggtgatggggtaggaagtagtgttatgtttcactatattttttgtgtacctttgaattttgcactatttgtggtattatttctttaaaaaggcaatttattttattatttttttcaaacccagcacagaatattaacaaagtagataatacataggatggatatggaatgatttgcttggatcactccaagcaaggcatctgaactattcacatggttgtgtttggaagctcccagggtctaaacactgtaagatttcggagatttataccagatcagactcacaaacatttgattttcctcatttttcaagattttttcccctctggcctttcatttattcatttagtcttcagtagagagaccaggggatggcttggatttaggggcttaaccacctccatcttcatcagctccattcagctgaagctgttgctgttcttctgaaaagatcccaggagcttcccaatacatatgcaatctctgtaaaagcagtgtgtttgcaaacacagctgcaagaaaagcctcctacagcaagtatataaaaaggtgctcaatatcactaatcaggcagatgcaaatcaaaaccacagtattacctcacacctgtgagaatgactattataaaaaacacaagagataacaagtgttagccagaatatgcataaaagggaaccttgtatactgttggtgggaatacagaggccattgtggaaaataatatggaggttctacaaaaaattaaaaataaaattcttatatgagccagcaatcctgtttcttagtgtagatccaaagaaaatgaaatcacctcatagagatatctgtgcccccatgtttcaaagcattattcacaatagccaagatatggaaacaacctttggctgtcaatagatgaatggataaagaaattgtgtgtgtgtgtgtgtgtgtgtgtgtgtgtgtacacacatacacaatggaatattattcagtcttaaaaaaggacatcctgccatttgtgtcaacatgaatggaccaagaggaaaattataatatgtgaaataagccagacacagaaagaaaaatactacatggtctcacttatatgcgaaattaaaaaaaaaaagaaacaaaattcaaagatgtagaaacagagtaaaaaggtggttaccaggggtaggaaaagtgggggagtggggagatggaggtcaaagggtataaagtttcatttatgtagaataaataagcctagagatctaatgtatagcatgaagactgtagttaataatattttatttcataagggaatttgctaacagagtggattttaggtaattctactacacacacacacacgcacacagaaaaggtaactgtgtaacatgatagatatgctaatttgcttgatgtggtaatcatgtcattatgcatattgttaaataaaatttatggaagctctcattctagatcccaacaaaccaaagcaaaatggagtcccacacgctaagtgccacatgattaaactgaaattttaagaaagcaggtaaatttccaaacagaccagatatttttgaaaacagaagattcacagaaaccaattagaaagggcccagtcagcctaagtcagtataataaggaaatctccacagttttaacccttataagaaaagtaacctgaagtaatctgatgttaaccgatctgcctttttctattattctgtttccttgttcccactttacaaaaaccaattgttctgccatgcccagtggagcattcattctatttatagaatacaatactgctgaattctagaatcacaaatagaagccaattagatcttaaaactaaatttgttatagttttgccttttgacaatatgtatatcaaaacatcgtgttaggtattgtcttagtctgttttctgttgctataacagaataccacaaacggcaatttatacagaaagaagtttatttggcttacagttctggaggctgggaagtccgagagcatggtgccaccatctggtgagggtccttcatagtgaaagggtggaaggtggaagtgaacactagaaacagagagcaaatggaggctgaacttatccttttatcaggaacccactcatggggctctgccctcgtgatctaatcacctcttaaagggcccacctcccaataccattacattagcaattaaatttccacatgagttttgaagggggcattcaaatcatatcaagaaaaaaaaaagtcaagtcccctaggcttctcttctaggtagattcctgcttcagtcccttcctatatagaaactctggagtttcccctacctcatactattgcctgttttccatggctccaagagaaaaggaatattctcttttcttctgaaaaagcactacagtttattggtcagcaccaagtgtgtttaacttcagtttcagatggcaactcacacatagatgtgtttatgttgccctttatcagtattatcattggcaaagcctttggtaagcaacagaagtggctaaacagaataattccaggcttgaagttcctttttcatctggttccctctgggaaaaggctatgaaagctaagggtggtggccaagtcccaaaggccaaggtcaccatcaaacattttctgagaatctaccaaaaacacaggtctgtattaggtcaatatgcacacagttgtgctgggaaggaatgaagctttcaaatatgagaactgtacctgaaaaatctttgccatcagttctttgaaatgaaactctaagctgggaagaactctctgcttaggggaagtaggactaaaacttgacttttgatttggagaacattcaaaagactctaagctcatgagtgctcaacttgtaattttttgcccttgaaaaaactataggcgggtgcagttacacctgtaatcccagcactttgggaggccaaggtgggtggatcacttgagcccaggaattcaagatcagcctgggcaacatggcgaaaccccgtctccactaaaaatacaaaaattagccaggtgtggtgatgcattcctgcatgccagctactcgggaggctcaggtgaggggattgattgaggctgggagattgaggctacagtgatccgtgatggcaccactgtactccaacctggacaacacaaagaccctatctcagaaacaacaacaacaacaaagaagcaacaaaagggaatttgtacttttagccatagagccttcaagtttgttataaccactggggagaaaacccttcatttctacttcattcctaaaatgggttaatcactgattatacatagaaaatttactcaaatgaaaacaaaccaccaccagattttacctttaaatatattttcttggtattattttaggttctggtagcaaaaggtgcagagataaggacatgggttaatgacatgggttatttattgcactctgcatacagcagcaagaatgcttttcctaaaaattctttttgctgaagtcccttttttgcttatgtctcttttcctaaaaaatctttttgcttaagtccctttgttgctgcccacatcatttgatttcccacagcaaattattataagcctgcattatcctgtttctcctcctcctctgaatcttcctctccatcagcacgatttctgttttctttctttgccaactagctgtgtggctaagagtaagtcactggagtctcactgtccctttgtctgtaaaactatggttttggaataagaagggtcctggcctgctatggggtgtatcagagtcagggtgaaagggtcttaaggtatttgaaaataaagcagcagataagcttgacatggagagtagcctacctctggctctgttttctccatttccttaggagtgaaaagctggccgtcagcaagcagattcagtgctcacattgtagccacataatcaaaggaagaaatacatatctttttttttttgagatggagtctcacactgtcacccaggctggagtgcaatggcacaatctcggcttattgcaagctccgcctcctgggttcatgctattctcctgcctcagcctcccgagtagccaggactacaggcgcctgcccccactccgggctaattttttttttttttttttgtatttttactagaggcggggtttcaccgtgttagccaggatggtctcaatctcctgacctcgtgatctgcccgcctcagcctcccaaagtgctgggattacaggcgtgagccaccatgcctggctgaaatacgtatcttttaagatctaaagaaaatcgttttaaagttactgttgtgtccatcttgttttcttgttactgaacttatttcaaaaatttaaataacattaaaggaaggtataagatttttatggctatccaaaagctgcattaaaaaaaaagtaacttaaggatttccaagtcaatttccggctgtgaaaatcacactgtgtcctgagttggtgggttcttggtcttactgatttcaagaatgaagccgcagaccctctcagtgaatgttacagttcttaaagccagcgtgtctggagtttgttccttctgatgtttggatgtgttcggagtttctttcttctggtgggttcacggtctcgctggctcaggaatgaagctgcaaaccttcgcagtgagtgttacagctcttaaggccacatgtcgggagttgttcgttcctcccggcgggttcgcggttttgctagcttcaggggtgaagctgcagaccttcatrgtgagtgttacagctcataaaggcagtgtggacccaaagagtgagcaacaacaagatttattgcaaagagtgaaagaacaaagctaccacagcatgaaagggaacctcagcaggttcccactgctggcttgggcagcctgcttttattctcttatctggccccacccacgtcctgctgattggtccattttaaagagagccgattggtctgttttacagagagctgattggtctgttttgacagggtgctgattggtgcgtttacaatccccgagctagacacaaaagttctctacctccccaccagattagctagataacagcatccattggtgtatttacaaaccctgagctagacacagagtgctgattggtatgtttacaaaccttgagctagatacagagtgctgattggtgtatttacaatcccttagctagacataaagattctccaagtacccaccagactcaggagcccagctggcttcacccagtggatcccgcacgggggccgcaggtggagctgcctgccagtcctgcgctgtgtgcccgcacacctcagcctttgggcggtcgatgggactgggcgccatgtagcagggagtggcgctcctcgtggaggctccggcgcgcaggagcccatggcaggggcgggcgggcgggggtgggaggaggggaggctcaggcatggcaggctgcaggtcccgagccctgccctgcggggaggcagctaaggcctggtgagaaattgagcacagcagctgctggcccaggtgctaaacccctcacttcctgggccttgtgggcagagcctgctgagcccacgcccacccagaactcatgcccagcccagaactcgggcccacccagaacaagcgccgtgcccagccctggttcccgccagcgcctctccctccacacctccctgcaagctgagggagctggctccgaccttggccagcccagaaaggggctcccacagtgcagtggcgggctgaagggctcctcaagcacggccagagtgggcgccaaggccgaggaggcaccgagagtgagcgagggctgcaagggctgccagcacgctgtcacctctcaatacgatctgtgaacatgtgccctttctcagttcagaaagccatttagagcaaatgtacttatttactttatccaggctctgcttactcctctcctctccacagccatctcctccattagaaatgcttttccctgccatttttgacagaccctgagcctcctggcctccctgcctgagacgcattatagtctctctgacctggaccactgcatgcagcttgggagcctccctgtctttaaggtatcggacaaaatatagatgagagtagcaaggcattaggagtagtagtaatagcagtacaaacaagaataataatttttatgataatagtagctaacatttgttgaactccttttatgtgccaagcattttatgtttattatcttaccacccttgacaaggaccttatgaggtgggtactatcaacccagtttctcagaaggggaaactgaggcttataaagaatatacaacttgctccaagtggtaactagtggagagaggatttaaaccttggctcttcaacatcccataacctatgcatttagttgctgttcataaatagtcacctgcatatgttcatcttgcttttacctgtgttcatcccatcttttttgtgaaactcctggaaggcaggtcgtgtcttctttcattcttttataccatctcagagggctgtaacaatacatgctcagaaaacatttctgttcaacctgcatgaagtacaaggcaggctgaaatgtaaagaaatacataaattacactgaggaagagcaaatcctttcatataactttttcctggcattacctcttaggggaaaagaattctcaagcaagctgtaactgagctggttaccaaaatcagaatgaattctccccaatcacgggggacattccataagcctttggagtgaggtctattttaaggattttgttcaagttcctccttcttgtttcctggccacactgcccagcacttcaattggctaatagggattctgaataagaaagatacaggcagctcacttggaagttacgttaaggactaataaagatcttggagtgattttcaacaagataagatcagcatcctggtattgagttattttgctacattaattaatttcagtttgttctaatggtctttggcctcctgcttaaatgtcaattgaggcaacagattaattccccttaaatagtggcctgtcatgtcttgttacttagttctgggttttataaagtaagaactaagatggatatttatcaatcgagcagatttctgtgttgtgtcctctaaagcccttggggtcagtgtctcactgtagcatcactaacaccttttatggaatcaagtgattaataaatgtgtcctcatgagactgtgatgcttctgggtgttcattttagataccttaataattagtctcaagagtagctcagttattaagtgattttggggttgcatcatgtcagggaaacaatcaagaagaaactattttaatagcataaatttctctgagatagtgaagataaaagaatgctaccagtttacccactccttactgtctgagtcaggaagaaggtggaacatcctattccttcttcacctctattacctcatttagaaaattttgactatttcttcttttagctccctttttacggtccaccatttttggaagatgactttctccctgtcttcttagaataaaaggtccaaaggaagaaaagaacaagatatgctcaggagttacctgtgatgacttcctctcccttgcctcgggcactggcccaccactcctttttctattctcagttctttatctatttacttttctattccctgctcctttcctattgtcctgacttgcatgacactggcaagctacaaaatgggaacaatagcaactgccttagaaggctgacaggattcacgggaagcaccctgagcagagtctaattcctaatgagtggtccttacatattaggatcattttctttccttttgagcttctggtttcttggcctctggccttagcctctttcaacatattctacataggtaatcagattcaccttcaaacaatgctgttttgatcttgtcatctggtgaagaaaaaataaaaccttcagtggctttctaagacgatgaaatcaaattcaaagtctcatcgtggtattcaaggtcttctgtaatctcccctcagcctgtggctcttactgatgccccattcttctattgctcagggtgctttgggctgtagccactaggttgacgagcatcctcttgacgagcatcctgatgatgctgataaaagtgctcaaggacattttgggaattttttctttagtgttatctaggatagtactgtatacaatgcatatttttatgtataaatcttatttctgtctatgttagttgccttgaaacaaaaactgggcctttgtatctgtgcaggctacaaaggcttgacactgctacccttagaaaggcctgcttgccaggttagcctttggttggtaactgggaactgagcccttggagggctctcagtcaacagtcaattgataagtgtggttcactgtgcctagacttttgtgcaaacaacacagtttatgcttgaacacctgctcccctgtttggagtctggaatattttgatgtgctaggcagagggtgcctatgtgatcagctccatgaaaaaccttgggcaccgagtttctaaaaagaagcttctgtgggctgaaacgtcatatacaagttgctacattttccttgctgtactctatgtgatctcccgtggtaggcagaagcataaggaaatctgcacgtaaaatcattcagacyctgcctgtggctctcccttatgatctggctgtgtatccttattacatcactagaataaatcttagctttaagtactgccatacactgagtcccatgggtccttctagtgatgtccaaatgtagggggcaggggtcttgggtacccctgacacagtatctctttcaaaacaaattcttagagtaggttcttaataaatattttgtgattgagcatctcaaatctcccaaacattgtagatgcttaaaacatttaaacacttttgtttctttttaccatttttgattttttgggcacctttaagtttttttttatatgccatcaggccaacatttataacatatggtagatctgagatgttgttttactgcctacaaagaattgttctagttttgcctatttattttcttttacttcccgatatttcagacactgttagatcttgccagagcagttcttttgggcttttgtgatacagaatcactggaaaaggtagagggttagaagggcacaggtttgaggactaggtctgggagatcagttttggtgggagggtatgaaggagagaggcgcatgacagggcttgtgtgatgtgacgtgaccacatgaaaggaaggggctttgtgaattgttgcggcagactgagattccttttcacagcatttgagaaataacagaaagagaatttgttattttgaaatgacttcctggcggctgagttgttttcatttgataacgacccctctctaataccaagtcatggtttgcagtttacgtcttagggttttcacagattttatttgatggtaggaaccacatcatttgttctagatttagcatgtgaaattcccagtaaattcttggtgacaatgactgattgcttcattcataaacatttattgaatacttgctgtgtgccaagcatcgtgtgtagaggatacagagatgagcaaaaataggtccctactcacatcatagaggggaggccgactcacatgcacacatttccaatcagatatggtgaatactagtggtggaaggttaggagcccagaggacagcatctcatccactgggaccttgcttcctacgaggcttgtcctgcatttcatggccttaaatttcaccaatgtagttatctagtggtgctgataaatcacttataattagttttttattgtctaagtatcaattttagctgctgtttttttaacctttctttagtttctgcctacataatttccttagaattaaagcatcaataatggacctttgcaaaaataagcactttctaacaccaatgtgccatccatcagcaaaggaggccattagcaaagtccaattcatagactgcctctgattttgcattttaaacttgctaatatttagctcacagtgtgattttcccacggtcacacacctagttggtggtgaattgccgtaattttgcaattcatattattttgcatgtatctcattttatttgtattctgtgccaatctctctgatattgaatgtaagtttattgagtgcagatgtctgtgtttttatttttgtgtccctagtgcccaacatatrgtctagggaggaaaatacttgttagataaacaattagatgatctattaggattctgtagagaaacaaaaccaataggaaatatatagatacataagaggagatatattgtggaaattggctcatgcaattatggaggttgaaaagtctcacaatatgtcatcttgaagctggagaaccaggaaagccagtggtataattcagtctgagtccaaaggtctgagaaccaggggagccaatggcataacttccagtctgatgccaaaaggcctgagaaacttcaggggagaatctgaagtcccaagaactagyaactccaatgtcagagcaggagaagatggatgtcccagctcaaggaaagagagttcaccttcttctgccttattgttgtatctaaactgtcaataaattggatgatgctggctcacatttgtgagggcagattttctttatttagtctactgattcaaatgctaatttcccccagaaacaccctgagagacacatccagaaataatattttaccagctatctgagcatccctaagcccaaccaagttgacacataaaattaataatcactgatgatagtaatgaaaagaaaaaacttggatttctgctttttggtcttcatgagatattttcctcactgtatctctcttcatgagatattttycactatatcacatggatatattttccacttcgatatagtagaaaatatgcatggaaaaatgcatctattatttattgagcacatattatacttgaggcactctgctaggcactgtattgaacaaagatgattaagacagtgtacctttcctaaggcacagaaaccataagataaatatacaaatgactgtagtgcaaggtagaatatacaaatgcacaactaagcaaatctgagaatggggctttcacacattgtgggagaatgagagaaagcttcatggaggaggtaacttttgacctaaaccttggagcaggagcacctgagttccagaggttaattaaaaaaatgaaggcagagggagagagggcagggtgggcaaagggaaaaacaggaaatataaatgtgagtcatttttggaaaactgtgggaagtctcttttaggtgtggtgtatgaagtgtgtgtatgttgggggaatagagcaaagtaaggattaaaagtcaggtttccaggctatgttgcctggccaagctcagggctttgcacttggttcatcagcattgatatgttttttgttttgttttgtttttttgacagcgtctcgctccgtcaccagtctggagtgcagtagtgcaatctcggctcactgcaacctctgcctccgggttcaagcaattctcctgcctcagcctgccaagtagctgggactacaggtgtgtgccaccccgcccagctaatttttgtatttttagtagaggctgggcttcaccacgttggccaggatggtctcgatctcttgaccttgtgatccgcccgcctcggcctcccaaagtgctgggattacaggcgtgagccaccgctcccggcagcacttatgggttttaaatatgagagtgacaacatcaggttattgggcagcaggaggtgggccagttttgaaaggcaggtgaatgaggcagtgagataagttgggaggggctgcaatagttcagaaacaaggtagtgtgcaagtaaatcacaggtggcaccagagatgaagaggaagaggcagtgtgacagctctgttgcatgacacaacatgggaaacgcaggattgagaagagccagaggtgatgatgccattagcagcgtgcatttagtacttatcacaacctatttacattttctatataaacattgatctcattagactgtgatctcctagaggaacaagtcccatgtcattctcattgacaaaatgaacatggcagatacttggtaaatgtttgctagtaagtgaatggaagtcaggcgagttggcttggtgatggcagctggggtgttgatggaaataccgtgcttctttttggacatgatggaatttggggatgtggtctatttgttagatgcagtttctaggaagagattacccaaagaactgaagaacaatgacaaacttatgtgtatgtgagggcaagataaagagtagagagatggtatagttgggtatggagagaatgctgtaactgaactgctcccttcaagatgtcaggtaagattggagagaaaatgcaggatagcatttgtcacaggtagttggaatgtggagggaagactggaaggatgagaaggactgaggtggacctgtgggctgtgttagccggtgaaagttggagggaaagggaaatgggaggcagtagagcatggagttacatatgcaggcactggagtcaggctgttggagttcaaaggctagctcttctgtggatttgttatgtgactttacacgctctctcttgcctcaagttcctcttctgcaaaatgaggttaataataatacctgcataaacacatgcacagcacacagaacagaagctggaatgtgataagcacttcataagcattaattcttcttactgaaactcactagggtcactttgtgcatattatcctatttaatccttagtaactgtataggtaggtgttattatcttcattctgcaaatgagaaaactgaagtgcaaagaagtttcataattttcctcaatccacacagccactatatgatgtgataaagcttacctaagctagagtcttacctgatccatctggtgcccgggctagtgcactttctcctataacactcagcctaagctaggtagatatggcaagaccactggctgaggcaactcagatgtgatcaataggtagtagggaactgtggctgacttgggggcaggggaagcagcatgctggaaagattcatctggtatgtttatagaagagagcaggcagcaggcatggggggctgatgattcagaccagaaatggctgaggaaatggtgaggtctggcaaatgtcagaggagctgtgatagaagaatgagcagaatttatgactgatgcaaataaggtagatatgatggtacgtgacagaaactgactaagaagtctgtatgcagtgggtgcagcttagagtttcaacttgaaagtttcaaacctgggactctaagaaaatagtctgaatggtaatgagaaagttgtcactttagtatctgcttcccttgaagaaaagcacctttagaggaaccaacttggagaatagtgtcgcatcaaagtgggacacttcattatttttagtggcagcatggttctgatgagcacaccgtcggtaacctttacttcactgtcagtccagctctgtcaatcctcctttattaaggaaggaagctgatggatctttcctttctttctttctttctttcttccctggagtaggatgttttctgtacacagttagcatgtgaacttctttttaaaaagaagtttacattttactctaattctcatccataacggagtgtggtgatttgcatttgggcagttaggaaaatcagttctgttgacttcctgttttctatttctggcctcgagcagaacttcccatttgagtgggaccaagaagagcatacaaagctgaaatgttctccagaagttgatttccaatggggataaagtaagttaatggtctgaggtgtttgtctccccttgcccccgaagcttgccctttagttgctcttgtttttaaactacagggaatgaactgagggaagcattttttttttttttttcctgcaggtcagagtcccaaagctttagtgcagggttccaaggactcaggagttcaaaacatgctgcttaggctgagctcttggccagatttggagattccaatgtcttctccctttgacagttcctaagaatattttatttggatccttttctttaggtttttctgtctaaacattttattttacctagtgtgaaggggtgagggagggcagattgtttcctttcttcctcctctccccttccccctcccctctcccttattctctgtttataatttaaaaggatgctcactttcattttctcatttgcttccttcacagcaccctgtgaagctgatattgttatccccctttgacagaaggggaaactgcagtttcagtgaatttcagtgacttagtcaagtcactcagttaacagtgctgagagtgaagccctagtgttctgcctttagatctctttttcccagtaccatactgcttttctggtggaggttgtagtatataggatgatgtcagaaaggagaggctgggaagcctgaaacgatcacatcgacaattgaattgtctgttttttctaataaaatagaaaatgttaactaaatatattgccatgcaattcttcaagcatataggactttgggtccttttttgtgtctcagactttaagatgatgtctcctggggagtcatttactatatgcaaggagaatagctgaaaagtcagggtaggccagcagtatttcatgctttgtacttgggcaatatgggtttttctgttggaggttcagcagaggatggtagcaaagtgacatttaattctcctgcttgccaaatcttggtgaggccaaagtgggtgggggaatcggttgtgagtaggtgttaatgacgagtgtctggaccttgacgtcttctcagtcctggagtagggaaaaaggaacagaattagtgctgtttagaagaagctggtgatggaggtctgcttaggaatgagtgcagattaggacaggggcagtgagggaggcccacagagactctggctgcctgtctttcctggcatgtctgtggaatgaccttgctctgccaggactctgggaggaagcctttgattttgggggaatctttaggactatgcacataaccagactttcctgatgggaatctccaagggggcctcctgggccagggccgtgggccagcaggtgtcttcctaacatggtctgtgaatagtgcccaacctaggcggtgccttcttttcctgaatcaagccctttcctcctcagtgccaaagcagaagtggctgggtgggtgaagatctgagtgctggcccggggccacaagccatgggccactacccatattgctgtgagatcctgacctttctcttttctggactcacaagataaagagagtgaatgaggaggaaaatcaaatattgtggcagggaggggctgacaaacacaggcatggccaacagaagtctcccaccaaagtgaggagctgagagaaggatttggggagggaatgtcagaagtctcactcccaggcaaaggattcaacaaaggaaaatccgactctggcttgaatatggtccaggtgtggggttagtagtccatgttactgtctgacatgggagagcattccactgtgatggaaatggggtgggttggggtacaggaggaaccatagaggtagaagagaaaggaggtgagaaggaacatagtctggcagttgaccagagtgtatctggctgtatggtgtagtccccataacagggcacctatgtctgtacattgcacaaaaacaaccatccagtgtgttcttaaaagtcctgtgaaggtacattgtaatttgaactatattttgaagatatcagaggatcctatcatttagaagaatctcatgggaattactttttaaaaagaaaataatcattttagggaatagaaagtctctcaacgattggttttgaatctctgggttttaaatccatttactccaagtaggattcagtatttcactctttcactggcagtggattgttttttctcctacatatatggcttgaaagctcttaacaaaggatagtaattaattatttcccagctatttttacctttgacgtattaaaagttggaggaaactatttcatttaacagaatttaaacaaaatgaaaaagttattttccttaaggtattctgctgtgctttttcaaggaaaagcctcctccaaaggcacttttggagacagttaccaaaggaaaatcccacccaccaacagagacactcagcctctaagtttggcttttggaaaatgaacactattcttttttttccaaacaggacgctgtgagatcagtcatgtacactatgaaaataattggtgtgcattagtacaccttgtgccagatttcatgcttgttgaaaggtgattggattcaaaccagcacatttaaaggtcaactggttgttcttaaactgtgcagaattttaactctttcattataatggattttaaccaaatggccattttaggaaggagagagactgcatactgtgttttaactttctgacctttttgttcttaaattttttgtaaagttctcagggatttcctatggatggaaagggtctgagaaatcagttctcagctggcatttggaaaagggtggaagtagaaactgagttctttttaaactgctaaatttaggtcagggctttaatacgactgtgcacatcacataagcaatgtctaaatgtcaggctgaatgttctctctcttttaaataagtacttcaagttcgttagtaatagctagccctctgtctctttcttgcttctcctctcacctttgagcaactttttaagttcctttaacagctctgtggagaaaccaccatgtaatgatcaatatttaacccagytggttgacgttagccccgtttctggaatgggtatttcactgggctttggggttttgatgacgttttctccccagtgactgtggatgcatggattaaatttgttggtctgcaaaataccatctgtctaccagccattttgctgtatttcccaaaataaggtaggagactgatgtgtctcaaataagcagggtgaaatttagtcatctgatgatagtttcttgggttgtgcattagtgtcctgatgagcccctagcaactttcaacattatgaagactagtttggaagcctcaaaggcagtatctttcttgaagaaaaaaaaataacaccaggcatttccacaaataccatacacaagtggtcaggtaaaggctgtgggagttcacgcatctgtttaccttgagtgtgtgtatgaactcttgtagttctaactaaaggcaaatggaaactgtatagagtcccattttgtcaagctgacaattcagtatcctcttctttcctggttgctttatagcccactcttagttgttmtctttctatatttcctacaatttttagctgtgaggctgtgtattcgttgcttaaaaattctgtgcctcatctgcttcacttgcaaaatggggaaaatgtcacaggatccttggggtgttgctttgccagccagaaacctttgtggctaatggtgcctttgcctgagttttgctcgggcccactgggctggttctgcccactcagcctgggcaggctgtgctgggctcacgctactggcccagatcttatgcctgccaagggtgagccaggcacaaaaaggcaaggggtatgtgaacaagggagctgcccattgtgcacagccagtcatgccagctgwagcagggcaggcagctccagatgccgacacaagtgctagctccctgtgaggctgtggctggaccaggtgtaccacagatggcttccactgctggcacccgggaatgtggtggtgcctggaagcttggagacgccaggaactacagagccccaaagagggtgtcacatccctggcttggggagctcccaggtctgggctccctgaagggctgcagttcctctcttcttctctcttctctccctcttctcacctgcaacatggcaagcaaggggtgtgtttcagccctgtttgtgttacagctctttcagtcccaccatttagtgggtcccaagttcttgtcctgtgtcctggaagaatgaggtacagggacaactggagggtgagcaaggcagagaggaactttattgagcgacggtacagctcccaggagacctgaagtgggtagctcctctctgcaggcaggttgtcctgtcaagcctgcagctctcaagagagaggagacccacagtgggtagctcctctctgcaggcaggtcatcccttcaaatgtgcagctctcaggagagagaagacctacagtgggtagctcctctctgcaggccagttgttccaacctctgcccagtctggctgagtccagggagttttatgggcttcagagaaggggaagtgagtgctaattggtctatggacagctgtgggcagcgtaagttctcactccagtctgtggaactagcagcctggcccccaggcttcaggccatcccaggcctaacggtggggcttcacggaaactgcccctttctgtccaggagtccgtctgcctcccgctgccatcaacctgctgcactggcacccaggctgttcatgccaaggggcacctgcagcccatactgagccactctcagctcccccttggcccccctcccatgctccttggtgcacagagtctggagggggccgaggcaacagggggctggtgtgtcagtggtactctgagcacgggcatacacagctgggtcgtgacagtgccccagcttgcacttaactttgctctgaaattggagtgggagctaggagtggggagaggctgggcagtgggagcaggcatttctgagcctgtgggggtaggggggtttcctgggcttctgagagtacagggatgcctgggtctgcacccacagctgggtggctgcagctgtgcccaggagggcaggactcccacccctcacactcagaagtgggtggggcttctgcctgttcccagctcccaacagctccatggaatgtgcagccctggctgcgccttgcctgctgcagctggcgtcttctcagcagccactccagatgggccaccactgtcatcaattacattacctaccttagtgttattgtgaaaattaaatgagttaatccatgtaaaatgctgggaacaatgtctggcataacatagaagctcaataaatattaattctcattattgttggtatcatttttgctataatttgaatcttttacatattgttgtgacatatggaggtttttgacctacagggtttcttctgagtggcatagctcagggtaaagtggctctcctcacctctcaataccctactgtcttttgcctaaattccagttaaggatggctagagacatcatatgggaaagggtggtcctgaaccagagagatgggagagcaaattgctaaggtggttcttgagggtagggatggagagccagacagagacaggtgtcctccagacagctgtcctttatcattcactcactgcctctgcagctcctgctgcctccttcagaaagcgaatgtatgttgcctctaatgcccttcctgagctaaagcccagtagttctcaaacatcctctttcaaagacactgagccctggtaaccttcattacattgttgttctcatatttttctcaagttaactcactcataacctacagtttcttattacattgatatattgattatgaatctttcaccattaacttttgttcatttctattccatcgcaaacttaatattcacaaaacaggcttaatctgagcacaagtgaaatggtatagctgcgaaatacctggcagtggtaggtactaggtgttataacatgatgacacttagaatttatagacacttagagcatagtttttcaaatattttggctgtaatcaataagagatagatttcacatcacagtctatacagatgtacatttatttatatgtatgtatgtaggcatagcttaagcaaaagtgtcatgaaacaatgttcaacctattgcacacaatgtactttcatgatttgtattctcttcttttttattgaaaatgagtctggtttgtaacccagtaaacacataacctacagtttgaaaaaccctgatctagaggaacatccagtgggtgcctcttgagttcttacgcactatccacatatcatccgtatcatacataatgggttgtggccatctcagttttattttgaggcactgcctcttctcatcctgacagaaaaaaaaaaaaaaaaaagaaaaagaaaaggaaagaaagctcagatcaagaactaacaccttatcttaaaacatataatctctcctttaccttatgctctttcctaataactattctttttcgattgtccaaaagaaaccactctaataacttataacaccatgtattagaaatttagaaaccatttttgaaagacagtaaagatgtaaattaatggggggactaaattatgcatggatagaaagactatttattataatgacatcagttctcccataaaatcaatgatatttcaataaaagggtcaacagtctttattttataatggagactcacaatcttattccaaaatttatatggaaatgcaagtagccaagaagaggcaatatagccctaaagtaaaagaacacggaggaaaaacttaaaactatctgatatcaatacttactataaagtacaatacttaagtgtggtactgacacaaagaaaaatggttcactgcagtgatcatatacatcttttgttagatgtatttgtatgtatttgatatttttgatgctgttgcaaattttattgttttgtaatttttaccctgttgcaagtatcagaaatacagttgatttttctatccagcaaacttgctaaactttgtggttaatggaaacacttcagctatagattcttttcaataacacaatcacattgtctaagaatatttttattttgcttattctttttcaatcctatgccttttcttgttttcccccccttgctttattgctttggctgagatttccagtgtcaaatagaaatgttgatggtaagcatttttttctcattcctgatttcagaagaaaagcttgtagcatttcaatattgagttattttttttgtggtgttaacaattttttttgtaaacaccttttattacatttaaagagttttcttctgtttctagtttgctaagagttttcttgttagacgttaaattttatcaaatggcatttctgaatctgttgatataatagaaatttctccctcattctgttaatctggttaactatattaaattgatattttgaatgttaaaccaactgtattagtctccaaccttgtagtaactaaactgaatttagttacactgtgtttcattactggattcaggtggttaacatttaagattttgcactgtcacatgtaagagagttctggcttgacttttcttttcttttaataactttgttgggttttggtgtaaaggatatgctgacttcataatacaagttgggagtggttcctgtttttctcttctctgtagagtttatgtaagattactgttaattcttccttatctgtttggcagaattcaacagtgaatcgtccatttcatataaacaagtttatttgcttaaggttactcagaatataattttaatatatctgaaggatcttcagttaatgtccctttttcatttcagatattggatatttgtaccttttgttatttcctcctttatcagtcagtctcactaggggcttatcagttttattagtcatttcaaagaaccatctgttggctttttattgatattctttattgtatgtttttaaaattttcattgatttctattcttatattatcatttcatttcttctttttctttggacttaatttgctgttcttatataattataattatataatttattgaaatatatgttaagataattgatttttaggctttattctcacttaatatttacatttaagactatacatctccctcaaaggctggatttagctatatggcacaaattttctactgtaggattttcacttttattcagttcaaaatgttttccaatatctgttttgatttcttctttgagctacatgttctttataaatatattacctaatttctaaatatatggggattttccagttgtctttttgttattgatatctagtttaattccactttggtcactttaagagaatttgaattctgccattactagggctgtgttctatatatgttgaagttttaaaatcatgttgttcccattttctctataactggtgactattttcccacttattagtctgttacaagaggtgtgttaaaatgtcttatgatttgtgggattatcagtttttgtaattctgttcatttttgctttaaataatttaagcctctgttattaggagcatatacttttaaaattattatatcttcctagtaaattcagccatgtatttcctcctctttatctattaatgttttgtcttaaaatctactttgtatggtgtgaacatggctacttcagctttattctggggtagtgcctgcatagcgacctctttctattcttttcaccttcaatcttatatatttaagaaatgtctcttgtaagaaacatatagctttgtttaatacagcctggcaaatttcgtcttttgaataaaatcttaatgtttgtgatttatgtaattattatatttgtgttttgtttaaatctatcattattatttgctctccatttgtctcatcttttgtttccccttttttaaaatcttttttactttctttgtcttgaggtttagaaaatttattattattttccacttttcctgctctgttgacttccaccactcccaacttatacacttctgtttatgtgttttcatttggcatcaatattaaccccctcaggacattattatcaaagacagtcaatatctatttagatatacccacatagttagccccctttttgactcctcgttttttctgtatctcagtttcccagctgcgatcatttctgtctgcctgaagagtacctgcagtgcttccttgagtacgtgaaagctgctgaggaatctctcagcttttatttttctgaaaatgtctttattttagctttgtttctgaaatacattttcacttggtatagaattctaggttgaatttccttttccttaggcatttgaagatgtttcattgttttctgcttccattgccatccaaagtcttctaaaacttccctaggtaggtaggtagaaatatttaactcaaaggatgaataaaaatgtatccacaaacccatacttctttttttaatgggatttaaagtttatagatatttagtataaagtatttttacatctgcagattgaatgcagatgatcaaaggaatcaagtatttgatgattcaaaatagagacctttgttttacatatagactaagggttggtccaggactatcaaaacaattctaggaagtatttttctaactcttgaagagagagagagggagcataaaatgtacataaacctaagttaaaagaagtatgtaaaagtatgttaaaaataatgcaaaaagcatatatgcatatattttgcttgaacttgatttccactgacttggagtagttcattctctaagaatctcatgtcatattattttatatctttctcatttgtgaagtcattcaagagatcctgccttgtatgtgttttccagataatttacacttttatttttacatagatgttgattagctgtgtttcattgaatattctcagttttgggtatcagttttcagcaaaacaactaaatgtgacaccttcctactgagcatattgggtctatacgtgtgcatttgacttacgacttatattttcacctaaaaaatattttggatacaatattaaattcttttagcattaatagagtgcttgaaatatgaacttagtgcttttacttttaaaatattttaaaattttgatatttaaaaatttgatattttaaaatattttttctgtactaaaatgcactacaatataatgtgacaattatgaatatggattttagattaagacaaacctgggctggaatagtagctctgttccttactagttgtgtatccttggaaaaacaactccaactttctaagcattagtttccttatctgtaacacagggtccataatttctaccttacaatgctgttttaagaataaacgaagtgggaaatgagttagtatcatattcatatatggcagccattattattattattattattattattattaaatttctatagtatgttattgcctaagtttgttcatagaataatgtattggcaaataatattccagtaggagaattattcttataaaataaattaaagtaacttactttattctttagagtttaccaagataggtatatttagtgaacatgggagtcaacagcrtataataaattctgtattcttaatttaacaagcatttattgagtctctaacaacaagcttagcagtgtttaaaacaccatggcagggctgggcatggtggcttatgcctgtaatccctcactttgggaggccaaggtgggaggatcacttgaggtcaggagttcgagaccagtgtggtcaacatagcaaagcatcgtctctactgaaaatacaaaaattatctcggcatggtggcaagcacctataatcccagctacttgggaggttgaggcaggagaattgcttggatcagggaggtggaggttgcagtaagaactcgccactgcactccactccagcctgggcgacagtgcaagactgtctcaaagaaacaaaacaaaacaaaacaaaacaaaaaaactaccacggcaggaggaatttcaagcatgtgaaagctgttaccaaggataattgtgcctccatcacaggtgtctgcctctccccatctctgctgtcagtgctggaacccacacagtatcacttgtctgggttttcacagtagctgccttaccacttaactcccatttattgtctctccaatccatcctttatactttttccagaaattatctttctaaaacaaaatcatgccatcatcattcacacattcatagacagctgttgtctgtggaaaacacttcagcctcattaagatgtaaggccctccgtactcttgcccttccagctgtatcacctcctgtttcctttcctgcagcctatactccggccataggactaattgcaaatctccattagtaccgtgtccttcccagctgttattttagctagacatgtttttttagccatttcttgcctctcaaaattgtactcattctttaagatataagagaaacaccatcttatctatagtctccctagatgtagaggatgaattcgagtgttaaaagcaagaggtgggcgttgtagtgttctaaggtagggagactaggtatagaaagaaaccttgagatggaaaccaaggacagagaaacttttgcagaatgctgtctctgtgggctgcctgccctgtctttcagctggaagtggttcttcctttctgtgttctctttctctgatgggctgctgagaattattgcatgtaggaagccagagaatgtctcactgttctcccagcagctgctgcttagggctctcttactccactcttttttgattccctggtctcctgcagagccatttattgtctggaccttccctatacgttgtcttccccttagctcaaggcctggcctctccttatctctcctcagagtttgacttctgatgggatctgttgtgctggaactagctgtgatgtttctcttcttcctgcttcacctatgggttggttcctcagcccttatactggtcccactggcaccagccctgacccgattaattccctttcatcgtcctccatacccaaaggtcctgtcttggaccagggaggctcactgggccaagtattcatcacaaatgttaataaatataacctaattttaaaagaaatatctccaaagagtgtagccttctaggagactgagtacaaaaaaaagaaaggggtggagcaggacagagtatgaaagaagactgcaagaaaaggtcaggtacaactgggagagaaaaatgcagaagctgtgggcatgcaaggccagaagtgtagccaagaagcagraggtgaagtcaaaggtggatgaagggaaagaaagatgaaatgagagaaaaaatcctaggagtcttagcattggagggggaactcaggtgcgagaaatgatctaataatagttgaatggagagaaaatcaatgtatggtcaatcttcattatcacagattatgtgtttgcaaatccacctacttgctaaaatttatctgtaatcccaaaagcaatccttgcggcgcttctgcagtcatttgtggacgagcgtgaagcagtgaaaaatttaagcagtgccacatgtgtatttccagctgagggtgaacaagggatgctcagccatcgtgtttcagccctcatgctgtaagcgagggtcctttccatgatacgtttaatgctgtgtttttgaattcttgtgtttttcactggtgattttgtcatgtgaaatggcttccaagcatagtgctgaagtgctctccagtgctcctaagcacaagaaggctgtaataagaagaaatctggccaggtgccctggtgcatgagaccagcctggccaacatggtgcaaccccatctctactaaaaacataaaaatcagctgggcctggtggtgtgcacctgtaatcctagctactcgggaggctgaggcatgagaatagcttgaacccgagaggcggaggttgcagtgaaccgagatcatgccactgcactccagcctggatgacagagcaagactgtgtctcaaaataaataaataaataaataaataaaagaaaagaaagaaagaaaaaaaaagagaaatctgcatgttggataaactttgttcaaacatgagttatagagctgctggcagggtgtttagtgttaatgaattaacaatatatattaaaataagctatctttaaatagaaacacacaaaaaacaaagttatgtattgattaggtgatgaaaatattgtgaccagaacttgcagaaacctgatcttacatttcccctgggagcaatggttcagtatttgctaattcagtgttctcagtgactttatagaatgtaactgccacaaataacaagaatcaactctgtaaacatttttgttggtcaatggatatgcatgtttagacattttgtagaattatagtcaacccaagtgaaatggaactccttttatttgacttgggaagttgctctattctcttctgtttcaaacaaaactctaaataaaatcctcttttgttctggtttattttagcagatgtttactggtgtttactggcaaatgtgttgagtaagttaggtaaagttgacctagacacagtttttgctcccaaggaattctcaattgatcatggaagacaggagatgtgtgtaatcaacagtattgacattaatttgtattcctggaacaggtatcgactagagtcaaagaaggttttggctggtcctgaacaacaaggaacccaacgtaggttcacaaaataaccacatattgtccatagagtaggtgtctacaacatgctagtgaaggttgacattatcttagagcttcggggatttatagatggaagggatcctacaggcccagtatgtgacaaggacctgagcatgtttagatgtagagctagaactgaaaaccaagcctcatggctgaaactgaatcctttcccactaaaccatacaggctctatgcgctcgaactagttattggagtcccggcttaaaatgagctcatgttccagaaattccacttaggtcagatgtttataagtcagtctgaggttgttccaggatgagctccaaggggtctgttttgctgtatatgaatatttttatagaaggaagctcataaattttcatgtgattctcaaaggagttcatgattccaaaaagtctaagaacttctgtgcttattctgaggttaactgtgcaccacaaatactaaattctatttggggtggtgtcttgacattgtattttgtatccctatcaatctagcagaagatttttttttttaaataaagaaaatgctcactcttggctaggatgtggtgaaacaaaacttcctatattgtcagtggcagtataaattggtatgaattttctaaaaagacattttccactttttgcaccagataccaaatttgtctttcaataatatattctaagaaagcaataagaaaaaggaagtaattagaaattatgtataaagatatttatagcatttttgttcataatatgaaaactaggaatcaaagtgtctaagaattacagttttaaaatatcacttaggccgggtgcggtggctcaagcctgtaatcccagcactttggaaggctgaggcaggtggatcgcctgaggtcaggagttcgagaccagcctggccaacatggcaaaaccctgtctctactaaaaatacaaaaatcagctaggcatagtggcgggtgcctgtagtcccagctactcaggaggctgaggcaggagaatagcttcaacatgggaggcagaggttgagccgagattgtgccactgcactccagcctgggcgacagggtgaaactccatgtaaaaaaaaaaaatcacttaatattatgaaaaactgtttatgacaagacatgatgtgaaaataatcatggcatatatagcataatcacaatttgtttatgtgtgaacagaataacatgttaacagaggttatcttttgctaatsggactagaggtgtttcttttcctttttattttttctttttgtatttttcaaattgtctaaaagactatatatttttataatcagaagaaatattgcaaccatattttgtcccamttgaactatgatttacttacgggaagtcctatccttgtttcttagtttctacattttaaaatgtctcatcattcattttggctgaaagttaaaatgcaatctcagttatttcacgttaattcaattacaagcccttctcttcccacagtatcatttcatcttaaaccttcatactcagcctcctttgcaactctggcctctcttgctttccattcctttttgttctttctctgattaaaaaaaaatactaaattctgtctgcttttctttgacagcattagccttttttctcctctgctcagaatataatttttgctattcagtttttcaaatatttaccactgttccctttgtttctttatcctggtttttaattttgtaaggtagaggaagcattcatggaatagtctgttccaaacctcagagcctcagtagtgcttttgcattaattaaaaagtatgtattctttttgggatttcccaaagtattttcccattatatcaggaacacatgtgtatatgtgcatacatagggtatgcatgagaatgagtgtattcacgtgtgcatgtatgcattcatgtttgtgtgcatgttggtgcatacatgtgcaagttggtgtgcacttgtgagtgaatacatgttccagttcttccagaacaggaactgtgtcctttcctatatgccctacgcaagtagacactgcaatgatgctgactgcctgtttgcctgtctctgtatagccacctttcagagcttgccatctggatctcagacagtatgcagaggagaggaatgttctaatccaccctggtaccaacaggctggcatctgtactttgaaagctttgatgaagaagatgcaaattgtgttggctgtgtgggcttttcagctgcttcctgactgggctagagacaggcagcataacttttaatctctccaaaagcctgccaactggcaaagagatacatgtattagataagatggtggatctcgatttatatatgtatgaatgcagactgaattaaaatggcaccctaagggagaagccaaggaccaaatcaggagaccctctaactgagtcagaaatcaaggccaggatttataggatgaacatttttaagtgtacattagaatgtaaagtaggtatttgtaattgaagtactatgcttattttatttccataaacctaaggtctggcttcgaagtggcctcagggtatatccgtcagcactgagccttgtaaatttgcctgctaaatcaaacctatgatgaaaagaaccaggcaaataacactgtcttgcagtgtgcaagtcccgtggctgtattatagagtgctcagctcagtgtttcacagtggagaagaacgtacgttgatatgctttctgggtttgagagctcttccttcttcatccagaagacagagctgggtagagaaaaggataaccagcaagacaaaggctttatcccaatattatatgtttaaaactcaaagagatatggtgaaaatgggactttattaaatttgcctgattggaaacaaacatgcaaattgtacaagattcctaaatgtgccaaaatggcaaggagagagccctgacgagcatggagaatagtgagtaatgcttatgtcctaacagtgccccttgccttcattgacctttggaaatattgtgaaaaagtcaaccttttctattctgtctgtatagtcttacagtgtttcctctctttttctccctctagggagttatccaaagcccccttcacaagaaatgctagctttcaggaataatcaatcaagcacacctttgagcaaatgtaagatttatgttcattctatttagatatttgattttgacattgtatcctttattttggaayaaaatgaatgtcacctacatgcagacagatgaggcattttatgcttttgttgggggaggataggtttaggggagctctcccatttgcaacccggctttaaaccccacgtggcatgaagaaatcaattaaacagacagaaactcttctgggattgggaatctggcttctcatttaaaagaatatccccatttttctaaccataataaattttaattttcaagtaaaagccattacgtcaattttaatgtcaaatacattttaaaaagaagatgcagactgttgaaaagatggtggaaatgattacaacctaagcttggagcttactgaagtcaatcaacttcaacctggagcttgctgcagttccgactgcacttagatggttttgctttagtttccccattttagtgtagcagaggctgttttgttacctgatctttttttgtagagagaatgaaactgcctgagggacaatacagtgcactggagagggatgaaataaagtctcaagagctgcttgtactataccacctacctcaaacagcagatgttacagaactgcttttaaaaaaatgttgcctttcacatgtcatgctaaaaatatatacctaaaaagacctaaaaaaaaaaaccttaaaagaactagagaagcaggctgtagttatacaaaagctatatgcaagatcatggaagcaaaaaaaaaatgcataaagacatattagagctttcttaagttccaagggagcttttgataatacattcaaaacataaatgggaaagtcatcagagaattgcatagtccccaggagactgcagaaggctttgaaatggatttaataacattgatgggtcggataggaagcccttattccctttgacttatcatctttcttttctttttaaaattcactttcaggaaatagttacatgatcaactctacctggctgactcaaatttggttctcggtttgaactctagttatctgtatatcttacagctgtccccttcagttgcttatcatgtgacttgtcattctgactgggtttgaagcttacaaaggtcaagaaacacatctttcatatctttggaatttcctctgtaattttgataccctgattgtgtttgcagatggtgtttaacaaatgttgcctggctcactggatacttccagattttaaaaaaagttaacagaatgatcttcaactctgcttccattgttaatatttatgtgctatattctgataaacccgtagaagaccagataagacaaaagcaggagaaacaagttgtagatacaatagtgagcgtgtaaaaggcatttaataatgccttgacatgaataataaacataccagtaataaagatacaacaaccttacgtttccatagattcttgattcctctaaaagcactttcatataataaaggacagagggataaagggaggagtaaatataaatgcaaggaataccaaaggaatgtagacatgaaaaagcaagaggaccaaagcaagacaaagaaaataatagccaagaataaagaaattgagggagaacttactaataacttggaacagttgttggctaaacagcacacatagcagagtatcaaataaatattgacaatgttggtgttcttgtagtgagtagaatatcctatagacagaatactctaggatattctatagacagagtattctgtctatagggtattctgccctgtttatgttttgtcttgttttctgctgagttattagggaaaggagtatcgtggattccctcactttctttctcttccatttttattcgtgatggttaatattgatactagtatggctatctttactccagatagtcaatccacatcatcaaaaagatatggacgtttgagtgatactcaacttcagtagcttagttcagtgatttcacaaaagctcagttaggcttgctgctgagagcataagtgaattttgcccttgttgtaaggttctaaaaatttcctaaccttaggaggcaggtctaaaattattgtctataatgctgaatatagtaacttattataaagaaattctaagaaaataagacatatcaactatgttatagaactgatattaaatctagaactgaaaaaaatacagatagaaaagttctgcctgtcatgtgctagaggctacaagagatccctaaaacacttttattactgctttgaagggataagctccctccaaaagcatggatcaactattttagagatttagagattgacactgctgttttggcaataattctaccttcatactttcagttctggatcagcacagaaaactctctcctttgtcagattgaaaacctgtagcagggggacagccaagatggccgaataggaacagctctggtctacagcttccatcaagctaccaatgactttcttcacagaattggaaaaaactactttaaagttcatatggcaccaaaaaagatcccgcattgccaagtcaatcctaagccaaaagaacaaagctggaggcatcacactacctgacttcaaactatactacaaggctacagtaaccaaaacagcatggtactgctaccaaaacagagatatagatcaatggaacagaacagagccctcagaaataatgccacatatctacaactatctgatctttgacaaatctgagaaaaacaagcaatggggaaaggattccctarttaataaatggtcctgggaaaactggctagccatatgtagaaagctgaaactggatcccttccttacaccttatacaaaaattaattcaagatggattaaagacttaaacgttagacctaaaaccataaaaaccctagaagaaaacctaggcattaccattcaggacataggcatgggcaaggacttcatgtctaaaacaccaaaagcaatggcaaccaaagccaaaattgacaaatgggatctaattaaactaaagagcttctgcacagcaaaagaaactaccatcagagtgaacaagcaacctacaggatgggagaaaattttcacaatctattcatctgacaaagggctaatatccagaatctacaatgaactcyaacaaatttacaagaaaaaaacaaacaaccccatcaaaaagtgggcgaaggacacgaacagacacttctcaaaagaagacatttatgccaccaaaaaaacacatgaaaaaatgctcaccatcactggccatcagagaaatgcaaatcaaaaccacaatgagataccatctcacaccagttagaatggcgatcattaaaaagtcaggaaacaacaggtgctggagaggatgtggagaaataggaacacttttacactgttggtgggactgtaaaccagttcaaccattgtggaagtcagtgtggcgattcctcagggatctagaactagaaataccatttgacccagccatcccattactgggtatatacccaaaggactataaatcatgctgctataaagacacatgcacacgtatgtttattgcggctctattcacaatagcaaagacttggaaccaacccaaatgtccaacaatgatagactggattaagaaaatgtggcacatatacaccatggaatactatgcagccataaaacatgatgagttcatgtcctttgtagggacatggatgaaattggaaatcatcattctcagtaaactatcgcaagaacaaaaaaccaaacacctcatattcttactcataggtgggaattgaacaatgagaacacatggacacaggaaggggaacatcacactctggggactgttgtggggtgggggaagcggggagggatagtattaggagatatacctaatgctaaatgatgagttaatgggtgcagcacaccagcatggcacatgtatacatatgtaactaacctgcacattgtgcacatgtaccctaaaacttaaagtttaataataataaaattaaattaaaaaaaaaaagaaaacctgtagctctggtatcatagtggctgtagtgactggttgaatgatttaatctatttcagcctcagttgccymagctgttagaggagttaattatatcagtcctgccttataatcatagcaataattcccatttccaaatgcctgccatgggtcaggttcttgctatgtctttggcacatattatctttaagtctcatcaactctgcaaggaaggaacaattgtcattcacagtttacagctgagaaagctgaggctcagattatttcagtaagctgcctgaagtcatgcagctaagtggcaaagccaggatataaacttcatatgtatgttcacaaagtccccgcttagtcctccatggaatttttagagttatttaaaatgacatgtgtgaaagtgttttgaaaatagcaaagttccttgtaaatgcatgttattattatcatactgatgaatataaattacttaacatctatttaccaagttccttatagatatttagcactgagtcagttttcattttggacaatctatggaattagttatttctctaatgtagtattacataagatgcattataaataaatcttaaatattttcaagtggaaatttcttccatccttgggaccaggttcttccttcttctccttcttcttcttttttatttttatttttttgagactgggtctctgtcacccagtctgggatgcagtggcacaatcatggatggctcactgcagcctcgaccttttgggttcaagtgatcctttctcctcagcctctccagtagctgggaccacaggtatggccaccacacccagctaatttttttatttttctagagatggtgtctcactatgttgcctaggctgatctcaaactcctgggctcaagttatcctgtttcaatctccctaagtgctgggattagaggtatgagccaccacacccagcctgggttttagtttctttttgatcatatttggagaaaaaaagaaaagaagcaaatttgctaatcaaaattgagtgaatgtttcaagaaacaaaaccaattaaatgtagtccaaccttgagaatcagcaagtaaaaacctctgaagccaagagggctaacaggaaaactgaaggagaggagagaaatataccataagcattttcaaacctctgcttcaaattcttgtatttataaatggtctgggccagcagtgcaactctccctgtctcgctctttgttgtttattttttggagtctttaatgaccaatcgggttgctgaaatttacttgaagagtttattcttgattctgaggtataagattttctgtgtgaagatggctgggaatccacacaactctcctaaaataagcaccaagttttggaaagaattttctcttgtggaaaacatccatttccaaagagagccatcagcatgagattgcttttttttctttttaaccgcccccaacccaaggagaaagctgaggggagtcagtctgtgaagcagccaggaatcaactttcatgacagttttaacattcaaggcagacttttcccttggtcttttggaagaactgctgaaatctcaatgaaagttcatgaaattctgtagaggaatcagctgagtctagaaataagctgttccttattgtttcctctgtttccttatatataaagagtgggtaaaaagaagcaccttggaaagtcattgtgagattaaatggcataatgcatgcacatctcctggcacaaactaatcaccactgttgtgttctaagccagtttcctaaatacacagatccagttgttttttaagtctcagtgtgaactgtttattctgtttggcccatgtggatatctaaagggttcacaaaaatgctttcaaattgataaaatatggaggaagccgcttttctagtcttcatcaaggatctgcgttgggtggaatagaatctttgtttgggtttggtaagagtttcatgatgcaggattttatagagagggagctaatgccattgggtggctgatcacctaggtggaatgaatgtggggccactcatccatgcatttttctgcaggtgagatgggataggtagcccttgtacagttcttctgtcagagatcttggtcacatttgagtctctgctgggctaaggcagaagcccttataggaggataggaccactacctggccaggcttggttttctttagctcagagcctggaattggctaaatttgaacagacaagattaaaaaaaacaagctgattatacaagtgatattgtaaagaaaaagctagataccataagagctggataccagcccagtgttgctgtttggatttgatcatactctcttgagtacaggaacaagagggcagcctaacattgtccctgaagccctctgcccacagccagtcagatccatgtccaaccttagcagctaggatgctggccatccctgtggcccaggccccatttgtacaagttctgggactggggtgaaggtattcttgttataatgcctttttaacacaattctggccttttgggagagagagtcaatgttttacactctggggartcaacttgtgctcggattcacctttggcaagggtcctttagtggaatggactctgcccagggagtcagtggactgctgtttgctggttgattttagacaagttactttatgtttgtgggcctcattttcctctgagcaaagacatctctaacctgagtcacagcacaatctttgtggtctgactctgtctggggcatggaaaattgtgtgtgtgtgtgtgtgtgtgtgtgtgtgtgtgcatgtgtgtgtctccagtcactggttctggggatgttcctccaaactgttcttgccttctttctgttatccaaacttttctgtgcagaagaacaagatttaagtttgaatggatcattgtttcttttcggctaaacaactgctgatagtcagaggatgacctatttctgaagcagacgaccaaggagaaatttatggatttctattctttagacttaaccagtgttccttcttggaacatatgttatggaacttgactaatcgccctggcaatatgttgccaaagttttcctggcaatagatcaaagtctgtaatataccagcacatcagctttgcagagctcagacaatgagaaaacaggtaggggtgggagaaagcacttgcaattaattttggagtcagattttgatagaaaagtagaaagaggataggactaattgacttctgaaagaattacakgtggctggtgtgccccatgactcacactgtaatctaaatactttgggaggccaaggtgggagggtctcatgaggccaggggtttgagatcagcctggggaacatagtgagaccctgtctctacaaaaaataaaaaaaattagccaggcttagtggcatgtgcctatgatcccagctgcttgggaggttgaggtgggaggatcacttgcaactgggaggttgaggctgcagtgaaccgtgttcacaccactgcactccagcctggacaacagagcaagatcctgcctcaaaaacaaaaacaaaaacaaaaaaaaagaaagacaaaaaagaattgcaagcggccaatacataagagaagatgcctaacacctaaccccccaattagcattgtgattataaagataacaatgctatcatttccccacatcattttggcagaaatgtgaatggatggttaaactcggtgtgcctgtgagtttgatgaaatggatgtgctcatacaactacctgatacaaccttttggagggcaggtggctgatacttactgaaatgtgaaatgtataatcttcttgcccagaaattctgggtctaggacttatcctaagaagacaactatacaaatgtaaaaatacatttatgtagtatgtttgcaaaagcatattcatggggaaaatgagaaataactttaatgtttatcaatagagaactggtatagtaaattatgataaatacctactgtgaaatcctgcatagtcaataaaatgatggtgtaaagcttcatatattaatgtgaaaaattatttaatggtacaaaacaggttatgaaacacaacaatcacatttctatacagtcatattactagaaatatgggaagttgttaatttaaatctgaacagttagaatttcaggctacctttacttcctttgctatttaactgtttcctctcccacctatcaactctatgtccttagggaaacttatttaacctttctcactcttggtgaaaatggagataataccaaactcttagaggttgttgtgagaatcaagcaataaaatacatgtcaagcacctagtaaaaaatgtattttgatttttttttgtcatacacagtttcctttttttctttcattatgtgagtacaaacagctgtgttcctatgcccagattcaaagagagaaagctaagtgggcttttgaataacttccacttattttaatgcagggaaagctctagttccaaatatgtggaacagtattttcctaaggctgcaatgtgtcagaaaaagaccatattgagtcattgttttctgaagccaagacaggagattgagagacggatgctgatgggcagcctaaaataatatttcattcttgtcatccttaggcagtttaagaccaagtcattttggatagatctacagtttccctctcggtttggaagaacaaagcttttgttatttatgttcttaaacaacagcgctttgtcctatactcaggagcgtgcaaagcaaacagaagatttcctgaacggccatcccatttatggtgaggagtcagtccaagaggtaagtagacatactcagctgcaaccatctgcagagggcccacattggcagcaaaaggaaatagccaagactcacaggagcacaacagccagtcaggtttgggattcacttctctgatactgtgccaaagttggtggactcagccattctgaaactcactgttcacttggggcctgctttgcacaacaaaacaaatagccctgttttgctttccatgtctgaggcagaaaaataaaaatggcaatattttgagtgtttttacattgggaatttctggtccatagataattatttcagatacccctgtgtaatcttttcagagctgttgaaaactgtggaataggggataattagggctcaagagatttcattaatggttaaaggatcattagaaggacacgtactgtatccctcttcttatttctcttcctgcactaaaacaactcctggcttgctaccatacttccgcacccatgtgcaattttcacttagcaaaaggtcaagtctaagtagaatctatgaagttgggattgattctgattggtaataatgctagctagcaagcattgaaaatttgtaccaggttttctgttaagtagtctgcatgcactatctcaatgattcttaaggagtggtccatagatcactggctttacaaacattgacgcatggtggtgggtgtgggcaatgaaaaggcagattcctagattctactctagatccatgggatcagcatcctgtagtgggagccagggatctaccattttagcaggtgccttgggtcatcatccttatgcacatgacattcgagagccactgtgttatttcctagtgcaactgtgactcagtgtaatctgctttctttccactcctctgatttctgtgtgtaaattttcatgacaaaagttagacaaaataccatggactgaagttagatatagagcaactcatgtctcttttagttgctggtgattgcaaatrtatctccatggccaaattgcttttgaggcactatatgtgatatttatctgtattgtgggaaggttaaagaagtgagaactctttccttgcttagtggtggcctgtgctctggaggtagagaggaagacacaggggccatggaggtgggacttacaggtgtggtacaggttgtataatcatgatggtgaccctgcatggagaagggaaagcttgaccttttccttggctcagggctatgcaaatagggctggcccatttctgagaggggaaggtagctgatatgcaggtgtgattccctagggcccagaaagacctgcctgccttctgcctttgttgtcatgcttcatgaggcctgaaatgttcactggtggttatttctctggttctcagctttagctctagaaagcccctattgaaatgacatgccacttggaagatagcaggaccatttacttatattttcacagactgctttaatctgctactctggggatggcacacaaaaagatttagttgatgggagggaggttaggcccctttgtgggccacaaagaagaatctggggagcccagggagactattctgggggtagaagtgaggaggaaaggctctaaagacaaactggacctatgtcacagttccgagggctgtcctccagaatacattgttttcctgaaattctccagccccttccatcattttcctctcagtgaatgtccagtgctgaataactgcccccttagtcacaggactggactgcagcagtgctgcaggtggtgaggctcagtggcacaagtggctctgggagggaatcttgatgtcggattctgtagctgcaccagcagagggggaagagggagataattacccacctctgagtctgagatccccctacccccagtgcattcttctgccaggagcaggatcattagaataagtgagacttagcttagctcattcaactccttgccaggccccatgcaaagctttcaaactttcaaatatacgatcatttctagagactatgttgggatcccctgcatttctttatccatttgttgagaaggaccagagatgatgcctaactttagccaagagtttgtctgtgggtccgataagcctcacatttgattttattggaattttaatcttgcagaaagtaccctatgtttcaattttaaagcattttttttgttaaactgaaaacatccctcaatttttccaatgttcgtttgtcctctagtgctaatttatgtggtaagtggtactggttcattaatttactcaggagggtgtaaccacctttcatggagaaggggtggctaggaaggggtttctagtgaaggaattcatttttcttggtcttcatggtgggtgctggggaagggtgtgcagtcagaggggctgcatttgcagaaacatggctctgtgtgtgagcctgggttctcaggaataggaagcaggtaggtgcagtgggtgggtattcatgtgacagtggaggaagataaggacaaagatcatgcatgagtagtgaatgaatgaatgaatgaatgaatgaatgaatgaatgaatgattgtgtatagaagtccatactccttctctggggtggctattccttcaccaagcagactctgttctttcttctgctgcttcttagtgagcacgtctaagtctcagttgatattctcttgctctgagaaatttctcatcaatgggaggagaaaatataattcgcttcaacatagctcatatttaagctgagaattcagcatgaattccagacatggttcatgtattttggataatcagcatagctgttcatgatcggtaaccctcttttttctcctccttcaaatcgtttttggttaggttaccatgactgaagattaatgacttccattattttttttccctcatgcaggaatgtttaaactagtctaaactttgtaccaactatcatatgaatcatgtctactactgttaccccttgtgtgtcatgtcctgggttagtgtccttgcatgacacagcaaaatacagggcagggttaaaagtgtcaattgagaaccaggcaaaaaactgatgattaatagtgaccaacacacttcactgtgctgttatcttagaggccttaaggcaaaatcttacttacaaatattagttgaaatgcaatatgtgatgttagtagacacatttcaccacatctggcagttcattaattcaccttcattttttttttcttttcttcttttttttaatcttttttttttatactttaagtactagggtacatgtgcacaatgtgcagatttgttacataggcatacatgtgccatgttggtttgctgcacccatcaactcgtcatttatattaggtatttctcctaatgctatccctccctcagccccctacccactgacaggccctcgtgtgtgatgttccctgccctgtgtccaagtgttctcattgttcagttcccacctatgagtgagaacatgcggtgtttggttttctgtccttgtgatagtttgctgagaatgatggtttccagcttcatccatctccctgcaaaggacatgatctcatccttttttatggctgcatagtattccatggaattcaccttcattttcaatattgtgtatatttattgcagtgagcttaatcctaataaaaacaattttatttctatttatttatgttttttcaattttttctttgagacaggatctcactctgtcactgaggctggagtgcaatagcacaaccatagctcactgcagcctccaactcctggacttaagtgatcctcccaccttggcctcccaagtagctgggactacaggtgtgtgctaccatgcccagctatttatttatttgtttctcttttttgcagagatggggtcttgctgtgttgctcagggtggtctcaaactcctggattcaagtgatccttggccttctaaagggctgggattactaaaggggcgagccaccatttctagctgacaattttcttttttttttttttttaattatactttaagttttagggtacatgtgcacattgtgcaggttagttacatatgtatacatgtgccatgctggtgcgctgcacccactaacgcgtcatctagcattaggtatatctcccaatgctatccctccygacaattttcttttaatgagcagtcaccatataataggctcagttctaagcatgtatttgcccatttaatcttcacaccagcctaggaggtagttactgtgtgtggcacccttttatataggaggaaactgaggcataatgctgttaagtagcttgctcagggtctaacaattaagagtcagagctgggatgtgaacccaggtggcctgactccagagtttctaccaaccaccatgttatactgctttacatgtttaaagcaaagatatggttttagcatcaaatattaagaatgcactccccacatttttcttattaaatgtaattgccagtttttgtatatgtcattgtcctaatgctttcgagaaacttagacaaagagcaagaccacagataaatggatccttctgttcaggtctcattacctagaagagttttgactgcaatatatgagtactaaaagttgatggtttatgctaattttaagtgtaatatattttagaattttgtcacatgcattattaytatgatttcatattcatggccttaggaagattaatttaaacaataacaacaagaacaacaacaacaacaaaatacaacaaaaaatttcccccatgtgccaagagcaaattttgaggtccatttatccagataaagtgttttgttatctgaaccaagaacatgaactttatctttatagtgaccacagactcccatctctagtatcatgatttttaatttgaattaaagcatttttttttgctttgttaagatgaggcaggccttcttgctgacattttaaaaagcaactatttttctttcagtttacactatgaggcattggctccaactgtcagcattgaaactgtcagcagttccctaccaggaaactggttccaaggtctagggtttccttaggtagaggctggcactgtgaaaataatggggctctttatccatgtcacctggaatggagttaataccctgccagtcttagttgatttgacatactaacaggatgggtctgaacgttttctatagtttactcatgagtgactttctttggcttacgtaaatggcaaggccagacaaattagcttatggacctagcaatcattcttggcccagattttgagacacttttcaatcaaccatagttgctctaatacctgagatttgctgacagtgcttggttcagaaaaaggttcagtttcctgagcaatttttcttttattgggatcatcttaattcttgtttgcggggttaagatgaaggaaatatgagcaaggactgcactcagctatttgggtgacccttgtataccatgagcttcttagatagggcctgatgtgatcaccagaaaacattaattgatcgtgatgacaggagatagtctctctagccagaacctgctaatacaagtcctgatgaattgagaatgatgcctgaaggaagcagactgacgtggtgcattagtaattttaggcaaaagaagataatggtactagtatgtatattttttagtttccttttccattgctttgttttgcacaggctgaagaaaataaatgtaaacagcatattatggtggctcagggtggataataatgggacatcacttcctttgtttcagtgtgaggttgcccctgctatgtgacagctccaaggactaaagatttcaatccccagaaaaatgtcgagtcccagtaacatgtttcaggttatcatgattattatgattataggaggggaagagcagtgctggtcttttagaaagttctcatcatgaatgtgttctggagtgaacatcacttactaacagatgagcagcttgaagttgagtcaaacaaaacttttagtgtttgtaagggtcagggagccaggggacagtctgtaactcagttgtatattgacacagagaatgtacaaaagctgtgaaagcttccacttgaatgactgcggatggttgctggtgacggtcttggacagtaagggttttcttcggagttgtaggaggtgaagtcttcctatgggaaatttctggacaaaaatacaaatgaaatgacttgcaggcctcagtttagagtattgttggctttgtctgtcaacaaatggagatttgaacatgggagttcaaggggattttaatgaaattttattaaggagatgagaagcagggagtctgtgttgaaaattcaataaagggcttgttttccatctcagcctggataatctatgttatctctgagtaaagggggtaacaattctaacaacctggcttccttagaagtttccattctcatatagtcaccgaaggcagcagcactgtcaaataaacaaaggtttaattaaataaaaactatttaaacagagcagaaatattcttccctggctagtcacagattggacaattcaaagaacaaaccctggggggaaattgccaatggattactttttctgttttctgtctattgcaacgtttttctttctggtgtcaaatctcaagttgaattcagtcaattatctacagccaaaaaaagtgcataaatgtctcttctgttactgtttatatgtcaccactaaataaagcaaaattttcttctcagcttcttgccttaggattttataagtccaacaaaacaaataaaatattatgtatattctatcgtcactatgaaagcataaggattgatttagttatgtacaagtttattgccaaagtttttcttcgttgctaatgttacacttgctacaaaatgtattaaagaaacagacaatttgctaaggatttggaaggatttgtcattgggttaagtacattaagtatctaaggggtgtggtgttctggttatgtgtatgtcagtttcacatatttttttgctttcttattttagttgcctctataatcattttgactttaaaatgttttctgcagatcctttaataactgcaaatgtagaagtatggtgtaacaagtaattggtatgactaacactaaaatgtaatgggaaataaggatactattgtaaagaaaacaagaaaaacctggggtaggggagcagtattgattctctcttaggattcctaagattctctgtcccaacccttctaccatggaacattcttatgtggtctaagtgtcaaagaccagaggaactgggcagtaacttatcttctcaattttctctctgaacatagatattttctttaagatacgaaaaacttttaattgtgctcctgaaacccatccctgtcctgtctcagccccgttgactcttctttctgtgggtgggtgaaaagcctacccatctgcaaaggtagctctgaaactgttctggaaaatcctgtattttcctccacaaatgatcgttttagtttcaagtttatttcaggtacattaattctccccctcctcagacttcataacaaatgatcctgcacacgattagaataggaaaatgtaaaataaaatcgaagcatatctagttgcctcagcgactttatgcttatcactttcagtctgcattattctactaaaaataaaaagaaagatgaaaattacctcaggcgtttgctgccgtgcctgccctttggtttctgggacggctcgggtcccgtagcgccggcacagctgagattgccaagccgggaagagaccttgctccaggtgtagctgcgttttccccagatcacctgtccttttcccctccgacaaggaagctgtgatttttctctggcctttagaggcaaagtgattccagataagtagattaatgtgtagaatatctcatctgtgttgttccagtgcagccctttcagctttccagagccagttagacttgttatgaggagctaagtgattggctggctctggagctcagtttcatagattatagcccagcgtacgagaagcacgagtcctatagttggcgtaccctgaggcctgccagttcctgccttaatgcatatgtagtcgtaattgagttctgacacggccttggatgtttctgtcctaaatagctgacattgcatcttcaagactgtgtgagtaatcctgatattttttttttaagctcagtaaattaattacatgccctgggagggagtgattgtaagtagaaaatactgaactagcagatgattcgtttttaaggtgctatactatgtgtatcaagttcaagacgatgaatcttaaagcttctaagaactggcagggttattccagctttgtgccatgaatcacagtcaagctgcattttgaaggaggctgtttgatgcatttgctagctctgtttgttttatggggtcagtaaagtggcagaggtccaacaggagcaggttaaagcaggatgctgggatcaaagcttagagagcacttgagtcaggcaagttttaagttttcccacccccaagcatctcagtccaaaactgagagcaagcagcaaatattataataaatgctttggggacaggggtacacagcagatagggcacagtaacaggagaaatgtaaaatgatggcagcaatacttttgttcactgtaatctgcagccaattgaagacatacactatgaataactaaaacatttttatatgaacaaaaatgctcttcagtggttctgtttatgtggtagagggctgaatgaaaaaccatgcgcttgttgtaaaaaagccttataaaaagtacattaaacacatacagacacaaccataacagaagaaagtatgtggattggaatttgtgattggagcagatcaaattaagccagggaagccgttattaggtttgtatgattgctggggggtaacttctgttgctgacaaggtttaggataaagctggagcagattgaagtggaaaaccagaaaacatcagcatttcattaccttctatagcatacactgcagggtagaattaatactgagtatagactggtaaatgtgagcagtttactgtttgcttttaaatcattattgatttcccctagcctatcataaaaaataatagggcttttgcctatgaaattagtgcttagaaatatttttcttcctcccaaataatttttatactttttctcaatacagcacaaaggtaggtcattaaaaataaaggggttccttttcaagttgctttttgtctaatttttcctctttagacctgtagatacaaatgtatgtatttgtgctatgtataactctcaagcataaatcatttgaacagtatttaaaatcacaggctcctgtggcaaatataaacttttaatagctatagttggcaattacttgccaattcctataaaaataacattagtggcttatttttgattgcacctaaacaactggcatgatttagccagtaggagagaaatattagttgtgttttgcataattttgtgtttagatcacactggaaatacaaagttttgttgttaaaaatatttttgctttctgaaatattatcccctttcagatcacaccaatgaatgaagtttgtagaaagaaagaaaagtagccaacgtagactccttttctgtatcaatcaaatatatgcaaaatacatagatttttaaaaatgtaattttaatacattcctttagaaacacatttacttcatgaagaaacagtataatgagttcatttattgacccagaatagtgagttgatttattgagtttctgtagccatagacacgaatagtaatggttggctcattcttagctatacattcctaactgactgtattagtgggagaaaggagtgcatctataaaataaatataatcccatccctcaaggtggtctggagcccatctaagagtaagaagtagtagagttgaagctgctttatctgaatcagctcctgacttcaactcagctcctctttttccttaggtccatgtggcccacttggtgtagtattcacatctccttccacctttttatgccttcattgtttacattaccttgcttgggctcttattgagatgaatcacataaaaatgcttaattatcaaacattaatcagctgcctatataattcagaggatgtttaaaaccaaggctcaaggaaattctggtgggtgtatactaggagtatttacgtcttgcatcggtactttcctctgggacttccatcacttcagttcttcctgagatgccagagtcatatctcttacttgtgaaagaacagagctttaagaaatggagtctagaggtgccaggtgcccagtggacagtgggctgggggcaaggcatggtggggaaagcaaaaaaaatctcccaaacagcaatagttgatctttcttctatccactcctctcaattttctaaaaccatttttgtctaactgtggaagttcttttgcagataaggttctgtaaaactatgcatatctgccatagacagatggatttgacgaaagatgtatccaaaaaggaatgtatcacatcatgaacttgctaagtgttcatgaatacacactggcatttggagactattaacactacctactgaagcaaagacataaatccaaattgaagaaaatataattttttgattgaattacattttccagtgggtttttttttttttggtgaattttgtttttggaaaaatttgctcttccctccaacgtttttcctgtgttatatataggactgatttgatttcttcagcttgcccaagaatttaataattcttactttgtgttttcaaaagagttgctgtctaccttgagcatgtttttaaaaaagcagaacaaaacgaatgaaacaaatgtccctcttcccacagaaaaagcacaccaccaaggagttaaatgccctacatttctttaagtccctccttttgtggagctagacactggtagaagaggagctttcatttaatttcaagacaatcagtgattccaacttaactataactgtgttcctctaatatctgatttcaagaagcagaacattttggtgaattaatcttagagtcaacgggaccacgctcaggccatgaaacgttttctaagcctcagtctctatgtctttaaaatgaaaataatgatatatgttctggtattttactagattggtgaatatccacatcacaatgagaaagtgcttgtcaaaagaacattgtaatgtgtaatttgtaatgtgctgtacatgtacactattattatgactgtagctcatcacgctagggttaggactctttacttctaaaacatattcccagtaatggacaaaacttttgaagcaaagaaaatcttcactgtttgatcctaatgttatgaaggcttttggaccttacatttgtttaagctcccattgaagctcccattggagcttcaatgctgatccatctattacttgagtattaaaaataccgataggtttactgtgataaacgaatgtggcattgtatgtgaaaacatatttagtaaacttccatgtgccatagtcgtataaatattacatattgcaacaattatcagtatattaataaaaattctttgcaaattttcaatttttaaaatggaaagtatcagatatatttcttattgattggattgactaactttctaagctatgtttgcttccctcaaacaggatgaatgttcctgttggttaagctttctttccacttagatacagcactaagccaatagttagataagcattccttcacagcctacatttggagctgccaatgacgaagttttagaggacatattttcctcacaggaaaaagtgggttaggaaatttagactgacagatgttcttgggttttttttttttttttaattcctgtcttgactctcattattaaattttgctaaggaaataattatgtaggttttgaggtgatgcttattcctagtagtcttttcatctcagggatgcaatgaatggtcaaaatgaccttctgaatgatttgaaagatcaattagcagttttgaatcccaaatttttaggtggttctgcttcagaaaatcattatgctttttggaataatgtccatagctgcatcctacatttcagtggtttcagctcactgctgttatagtttgatgatttcctaacagcaatattggttatgctaaagcagttccccatttcacctgttgaaccctttttaaaagatagaagaaattatagaggaatcacaataagtaaaacgtattaaaatggagtggattatctccacttttatctcacacagctcacccagaaattcatgagagaactttctaggaatgaaacaatttcatttgtagtagtatttgaaaactggatctagggccattgacctgacttttttgtgcctttggtgattggataagaacacttcttcagtaatttaaaactatagtgaaataatgtttttttttaacttctcaataggaatttatttattcagcaaaaatcaggagttaggtgctagaaacacaaagatgaacaatacatggtttcctcaaggagcttataacctactagacatttatttcatgttggcagaacttttaggataattctcaaagaaaaagggttattatgaggttgctacttttctcctcaaaatattttctatgttaataatgaaggaatgaccaatctgtagtatatgcaaaaagtactgggtagaaatatattaattttcttggctgggtgtggtggctcacatctgtggtcccagctacttgggatgctgaggtgggaggatcacttaagcctgtcagttccatgctgcagttgagtcatgattatatcactgcattccagcctgggcaggcaacagagtgaaactctgtcccccacccacccccagaaaagaaacataaaaattttcttataaaattttactttttagagtctccagccttatttaattcagttaccatatttgacaaataaatggtggaaccaagatgttaccaggtttaagtttcatatacagtagaactgtgacaggaacctagagtacctggaactagaatccagatctctgccctttcagtttaggatgtactgacaatatatattgctacttaaaattgctaaaacaaaatttataagcatctatatattttgcagctaggacaattatctacaaacatgatatttaatggaagatatggtaataacatctgagatatacaattatgttataaaatctaaaatcaacaagaaaggaataaagttgtaccattccaggaaatacatttccagagctttagatatccttattagattctacatgttagttttggtgatgttaactgccataacatataaaatctgaaatcttgttgacttaactgagaagtttatttctcactcaatcaaagcctaaagtgagtattcttgatgggcagattcttctcattcattcaagcagtgttcttgtgactccactcttakcaccttgttgtcacraccagcttcctggtgtctgtgctttggcaaaggagaaaactcatagaagtctgctcaccttctattggccagagcttggtcacatggccccatatagtgaaagggaagctggggctatagtcctatttgtgtctgggaagaataaaaagttggtttggtgattgtcttagttcaggctgctgtaacaaagtatcatcaactgggtgtcttataaacaacagaaatttattttttttttacagttctggaggctagaattctgagattagtgtgccagcctggtcaggttctggtgagggctgtcttttgggttgcaagtggctgacttctcctattatcttcacatggcagaaagagggtgagctagctctctggcttctttttgtaaaggcacgaaccccattcctgatggctccactctcatgacctaattatcttccaaagakaccatctccaagcaccaacacattgggaattagatctcagcatatgaattttgggacgatatgaacattcagtcracaacaatgatccactaagctatttctgccatacctttttttcttttctcttttctttccttactgttcttcagtatgtctatgtagaatctatgccttgtaaccaataaggtaatgaaaaaaattataatatttaccatctggaagaaattaggaaaatgattttacttttaaattcttgatccatatgttaaaaaatttccaaggctattaaaatatcactgaacattgtgattatagagattgctatgatttaatacttatgtcttatagtgaaaaagtagtcctgggatatttttctctctttacctcacccatcctcttctatgtcaggtatttgaatcccttgctttgtagttttataaaaagktggggagaaaatgaacaattgtcaaggaagatgaaatggctaatcaaaattcattcattctccatagttccttgggtattttataaactttgcagtaaatgctaacttcttattggggaaaactgctataaagtaagtgtacaggtaggttttggagaaatttttcttgcatggagttgagcaaatggtgcatctaacataagcttggtttatagtttctgtttttcagaagctagaagatttttctccactctgaacttctagggatcaacaaaagtatttatatcacaaataaaaaaaaacacagttacctctcagtaaacaattttttttcagattattctatttaaaaaatctctccaaatctgttaattttctgttaataaaacatcagtttcaataaaagtcataagcctgtcaaaccaattttagtcctttatcttggatatagtaggttaaaatatttttgttgggtgttaagccaataataaactcagctattttaacaaccaaattattttcctcctataaaccaaatttacaatcaagctacttaagaaataaagacaacaaatagaaactgttttaatcttcatatcctgacctaaaaaatagaagcacgaactcatgtcacattctcatatttatctgattagactaggaatgcctaaaaagaattttcccataactccatttacttgttgtttatttccctagctcattccaaaagcaatttaaaatacaacaccaaaagagtaaaatatcctcaatctgacatcctagcaatctttttattttggtgaaactgaacaataataataggcacttgcattcttcaccctgaggcactgaaaacactgatatgtctcagttttaagattctgaagattatattctatttaatagatattttaagtatatgtattatatttctagtctttgaactaaggcagtccacatataggtataaagtaatgcctcagcatagtgtagcaattattggtgcaaaaggttggtgcaaaagtaattgtggtttttgtcatgaaaatggcaagaactgcaattacttttgcatcaacccataactctgtggtctctggagccagactgcctgggttcagatcccagctctgccacttagtacctgagttactctggacaaactaattaatcttcatgtacctccatttaattatctggaaaatgggataacaatagtacctatctggttgggttgttgtagagattaagtaaattaatatacgtaaaatgctttacattttacgtatattaatttcaaaattgcttcgaatgatgcatatctcatagtgctttataaatgtttgtcatcttattattatttggggaactgattatttcacaaaatatattttctagatagctgaagtttattcagtcagtttcaaaacttctagatatagccagttttcatgggtctttacaaaaggatccctgtatctttgtttcttctgttttagagagattaaatggaatcttcctttggtgatactgattgaggtgatactgagataattaagaggacatgaagggatttaggaagagtgtttgcccctgcactaactggcccagactgctctactgcatcagccctctggcgatgttctaagggtttggacttcagtctactgcctatactagtacccttgctttaaaattcctgctcctattttgctataggctgtaagcaagaaaatagcctagtttctaaaacctatgtataaaatgagagaataggtgtcactcagggtgtcagttctcccctgagagtaaataagacgtgactgcattttttccttctgggtgagggttatgttttagagcaagggttggcaaactactacttcctgtaggccaaatctgttttttgtaaataaagttttattgtaacacagccatgctcatttgtttatatgtcatctactgctgctttcacacactgtaagggcagaattgagtggttcccgcagagaccatatggtctgtatagcctaaagtatttaatatctgaccttttacaaaagagtttaccaaactctgttctagagctttaaaattggacagagacagaaataaatgagatgttactacatttagtagtctccactaacctgcctattcaattatttgcagcaccacatcccttaaatgtattttggagaaacaagaatttattgcagtaggctatgttggataaagaacaaacagccctcagtagcacattgtgaatattaagaggtggtgaagctgtgattgtcaagccaagttgtttgggaatcttcattttagtatttgttgctctagtgtgatcagtayataacatgatgcaaaattatatagctttctgttgtgtgctgtagaatgttgttctagagatactaccagttggtagctccttttttcatgcaattattcaaagtaaatgtaaatatgtctgttgtccttttcttttacatgaaaacttcccccctccccaacgctgtaagattcagaagcatagtgtacagaaaaggatcttgaacttgggtttgaatcctgacttagtcactttataaaggagaaacatcaagttacattgccaccgccagcctcagtttccttgcctgtaaaacagaggtgggaatccaggctatgcttgccacaaaaggaggaccaaatgagactcagcatactagaaggctctacagcgcatattattacctgtgtctttaataatgttctcgatttggttcactttctcctcatacaaagatgtgtatgtttatggaaaagaatatacaatggattctgagtgaactaaaattgtcaactgcactgggtatgagtctgcaagcatgaaggaggctgggtgagaaagcctcttcaaacagcatatgtattcctctggtgtctgctttattattcacttctctaatgtgaaagtttatgctttagtgcagagctcctgggaaatatgcaaagaaaaaagaaaagataaccttggaggggaaaagaggtagtgcttatgccaatacaaaagcatgaatagaagcaaatagttgctggtttcttttagctgtagttctttaagtgaatctggtatatatacaagaaggtagttaatgttttaaagatgaaggaaggaatagtttcttttaatgaaaatagactctagtgctacggaaatgagaagtcccctgtgatgaggctagaggagaattactgaaggatgaagtgaacgtacgtggctccattttgtttttcttggaggccataaagaaaaccagacagcttactcagtgtaagttatttatacttgtaaaaaaaatcaccccatttttataatttaaggggatgctaacggttcagctttggattgcaattacattaaatgtattttctcataaacttgttttcaaatgttttaaaaagatttaaccagaaaatccagaattcttttgctgaatttgttttttaaatgctttagataaaatattttagaattatgaccttgaatttgaatttaagggactccttcaacctcctcttttaatctcctttgttatttggagggaattatccaagttgtytcagttagctattgttgtgtaacaaacagttccaaaacatagttttggattaaatggataaatgattaaaaggataatcatggaagattttcatgagtctaccagttggctggggagttctggttatctaagcagattctgattattttagcaagccttactcatgcattaggagttagctggcaagccaagatgaccttccttggtaaagtcaatgctccttcccatgtctctcatatccctccaacaggctagctcagggatgttttcacagtggtgtctggggtcgaagcatgggcaagtccagttgtgtaaaatggtagttggcaacacacatgcacttttcaagtctctttgtgtgtcacatttgctaacaccccactggccaaagcagtttgtggtggaactccgagtccgagtggaggattgtaaagttatgagtcaaagtgtgcatacataggaaggccatgagttgggccattaatacactcagtctaccagaagtcatttcaccttttttcctccatcttaacagcctcccttttggaaatttaacttttacatactgtgtaaaatcaaaccaaacaaacagaaaaatctcaacttacctggttacttttcagcactgtttttaaagcttggtcagggagtaagttgttattacaggctaaaattaaaattttgcttatttacttacacacttctcccctaactcctcctttttaaagcaaattgagtttaagccacaaactgttgaataatgaagttggttctttttcagttttattcatatctatccctgagctctattctgcctctaatcaatttctgtattttggagccgctattactatagcatttgctgggtgagtccgtggggttttgatcatgctttcatatgttcttgctgtttgatttcctctctccttaactccaggtttgcatttcttcctgcctattctacatgtcatagaggaacttcaaactggacgtattttaaagaatactggttatccactttgcccagtcacacataccttcaaccaacaaatatatatttgttgagtgacttccatactatttcaggcattagtaatatactagtgtaaaagtagacaaaatggaggccatcctagagtttataatctaatggggattgacagacattaaacaaatgtgtgaatacataatttaatgcttggccgtgataagggttattgagaaaataaagcaaggtgagcagaaagggaatgatggcggaggtgctttttttgattagtgttgagggaaggcttctgaagtgagggagtgagccatgacaatctgggcaaagtgtgctgcacgcaggggcattagtggatgcaaggctgtctgaatgacgtttggtgctgcagcagctgtacttccaatggaaagaagggtaggaaatgaggtgggggagacaacaagggaccagatcacgcaaggcctttgtagacaacagtaagctcgttacattctttctaagtgccatggcaatccattggtggatttggggcaggggagagacatggtctgattctggctgctgcgtggggcacaggctatagggagcaagggtggaagttgggaggctatgacagtcatggcaggggctgtgttaggagagtaacagtggagattgtgagaggatggcagactgtggagctctccaaaatgtgtttcatttaaagaagccaaatttagatactgtgatcagttctgccaagtcgagcctgtggagaagtatctcccaaagtagacccaacagacttccggtgacatctcagttacttttaggtgctatgtcacatgcatgaacttttaaattttaatagttactgatgattttaatgtggattagaaatatataaaacttgcatgtgaaaactatgattttacagttattacttggaatgaggaaaaagtattgagtgtagtgcagacttgaatgcagaaatagcaaaaatctctagggttatatctgaatgattggatttagaacatgctgacaggattatttgttagattgagtcctgagggatagtgaaggataactctggtaagtatgtaatcagatttagttattaccccttattgattatctactgaatgtcactctatgttaggcaccttctatakgacatttcactcagctttccctgcaacgctatgtgatgcgggtggtaattgtctttttttttttttttttttcatttaacagatgagagaagtgaagttcatagagaataaatagcttgttttaggaagtctctgatttttcagatattacaagattagctctggtaaattctctgcaaacaggaacttagtctgttttgtacactactgtctccttagaacatagaaacatttctagtatataatagacattaatcaatacttgctaaatgaatgaaaggaaaaagaatggttcttgtatttagatcttactcaagagtggtatattttgttttccttattatagaatgaggtttaggaagtaatctcttggagtttaatggaaagccattttcgtcataggatgacttcctgtgtcccctaagtgcaggtttcccaatgtccagaccttggccttatatttttctccttattctccttgaaggacctggctcttctggctataactacatgtgcaatccccaaatctcagtgtttgatcctaagctccagttgtaggatgtataaacccactaacaagcctagagccactttagggcaacataaccttggccaagtgacttaattgcccttgagccttagtctctgtcagtagaaggaagagatggaagaagaaactgagccttgatttgaacaaaacctatgggcactagaagaaagaaagacagggtgcttagggagcataacattaggggggagaagacctagaaagcaaacaattgaatttctattccttttgagcacccttattttgttttctatctagaactttctaaggagttaaaaaaagactcttttacataagttttttcaaaaggcttaaatttattttttcttaaaaaaaggtaaagtattgaaaataaagccattcaagcatttagagtcctggagaagctctaacctgcagctagagcagcttcacacacatcctttcgctgccagcagcagctgcacagagcttgctggaaggtctgaggcagggtgtgacaaactgacctgactgaatgaaggggcttctggaaaggggaggagctccatacaggaacattgttgggggtaaggtgagcctgtggaggatgtctctcctctctgcctttccttgcagagctgggagctgtggagagtggaaagtgtgtctgaatgacttcgcatgtttagtgaagctcattgccagaactgcgacttcccctgttgccttgaatctgctgatcagccctggcagcacacgttttttaaattatttaaaaagggacaagggttataaagatgaaaaccacatttttaccagcctctgcaaactcctaatttggtgggtgaaggacacatcaatgaaatttccagtataaggagtggaggtaagtgctatagtctgaatttttgtatccctctcaaattcatatgctgaaacctaatcaccaaagtggtggtattaagagggggtttgggaggtgattaggttgtgagggctctctctccatgaatgaattagtgcccttataaagagtcttgagggagcctgtttgccccttccatcatgtgaggacacatagaaggtgctgtctataaggtatgagccctcaccagacatttaatctgctggtgccttgattttgaacttcacagctctcagaactataagcaataaatttctgttgtttataaattgcccagtctaaggtttttgttatatatatatatatatatatatatatatatatatatatatatacacatatatatatatggcagctcaaagggactgagacagtaagccagacacagaggtcaacacctgccttgggaagataaaaaaattccaactgggtggatctgagtgatgacttggaaagaataggattcaaattaggccttgaggcaaggatgtgactgatgcttatctttaggaaaaaaaggttgttttactctaggtaaaggaagtagcctcttcaaaggctttgaagcagaataatgcggcgggcgggggctggggtggggtcagggggcatggtacatcaaacagtggggagggtgtagagtgcatagtgttgggaagaacaccatgaaattggaatgacagaggtgaaagcatatggtagtatggtttgcatgccagatgagctctttggactttttgggttggcatggggagccattgacactttggtgagaggatctgaggagtggagtggcaggggaaggccatcatcagctctgtgtgtgccagggcagcaagatttgttagcttaaaaaaactttttgaaataattttaatttagaggaagttgcaagaattgtcaaaaagttttaggatattcttcatctgaatttaccaattgttaacattttgccacatttactttatcattctcttgttctttaacatatacatattattaagagcacttttctaaaccatttgaaagtaagttgcagacatcataccccattacccctatgtggtaatatctaatatctgaagtctgatctccaaactttattcaaatttcaccagttgtcccaaaatataggaggtctctttctccctttctttcttccttcctcccttgcttctctgcctcccttccttcccttccttccttcctttccttccttccttctttccttctttctttctctttmttttctttctttcttttttctttctttttccttccttccttccttccttccttccttccttccttccttccttccttccttcctttctttctctctctctctttctttctttctttcatctctctctctctgtctctccctccctccttccttccttccttccttctgtctgtctgtctttcttcagatgctcctcascttatgatagggttatgtcccaataaactaatcataagttgaaaatgcatttaatatgcctaacctatcaaatgtcatagcttagcctagcctacctcgaatgtgttcagagcacttacattagcttgcagttggggaaaatcacctaatgtaaatcatgtaataaagtaaattacataaatatttcatgtaatttattgaatactgtactgaaagtgaaaaaagtatccaaaatatggtttctaccaaatgtgtttacttttgcagcatcacaaagttgaaaaatcctaagttgaaccatcctaagtcagagaccatttgtagcctaggtgacaatgaaataggcttgagtggaagcactgacagtgagaataagacagccatttcagagttgaacacaataagatttggcaacaatgggctttagggtaagagagggagtaaagctggtaatgaggttgtagtttacaggattgatgtccttaaccaacaaggatctcaggaaagagaatcgaagtgcaagggtgtgcttatgtttcagatttttcatttaataataataattagatttctatagtgctttcaaaggcagaaaggcagtatgattggaggcagcttatggcagtgatcaagagtaggaactccggtgctagactgtctgggttggaatcaggctttgctgcttattagctgtgtgacctgggaaaaatgacctaagttggctgtgcctcagttttcttatctgtgaaatgggaattttaacatcgtttccctcacaggatcattgtgaagattagattagttattatttgtaaagtgttattatttataaagtattataagccattctgacatatagtaagcactgtatgtgtttgctgaatcaatataaataaacttattttcccatattactgaatcctcaccagcaaatctgtgaggaaggtactattattattattgctaattgggactcaggtgttacatggtttgcccaaaaccatataactatcggtaaaaatgctcattctgttccacctaccagactatccccgggctcgctacatggggatacctaataggccatagtaatgggctagtgtctcagcataggcatactttgggagtattgtgggttcagtttcagaccactgcaataaagtgaatattgcaatagggcaagccatgcaaacattttggtttcccaatgtatgtaagttacatttctagtatactgtagttgattaagtgtgcaaatagcattatatctaaaaaaagtacataccttaatttaaaaatactggttgttaaaaaatgctaatgatcactgagcctgcagcaagttgtaatttttttgctggtggagagtcttgccttgacattgatggctgctgaatgatcaggatggtggtttctgaatgttggggtggttgtgacaattgcatgaaataagacaacaatgaaatttgctacatcaatcgactcttcctttcatgaaatatttttatgtaacatgcagtgctgtttgatagcattttattcacagaacttttcaaaattgctgtcagtcctctcaaacccagttgctgctttttatcaactaagttaatgtaatattctaaatccttagttgttacttccacaatgttcacagcatcttcaccaggagtagattccatctcaggaaaccactttcttggcttatgtgtaagaagcagctcctcaaatcttcaaattttatcatgggattgcagaaattcaatcacatcttcaggctccacttctaattctagttctcttgctatttccaccacatctgcagtgacttcctcccctaaaatcttgaaccactcaaagccatccatgagaagtggaatcacttcttccaaacttctgttaatattggcattttggcctcctcccatgagtcatgaatgtttttaatggcatctagaatggtgaattctttccagaaggctttcaactgacattgctcatatccattagaggaatcactgtttatggcagctacagccttacaaaaatatatttcttaaataataagccttgaaagtcaaaattactccttgatctatgaactgcagaatgaatattttgttaaaggcatgaaaacaatgttaatctcctcgtagttcttcatcagatctcttgagtgactaggtgcattgtcaatgagcagtaatattttgaaaggaatcttttttttttggagcagtagatctcaacagaaggcttaaaaaattcggtaaaccataattaaacagatgtgctgtcatctagtccttgtggctctatttatggagcacaggcagagttgatatagcgtaattcttaagggcttaaggatttttggaattgtaaatgagaattggcttcaatttaaagctaccacctgtattggtccttaacaagagagttagcctgtcttttgaggctttgaaactaggaattgacttctctttagcaatgcaagtcctaggtggcatcttccaatataagactgttttgtctagattgaagatctgttgtttagtgtagctaccttcattgaaaatctgttgttcagtgtagctaccttcatttgttatcttagctatattatccagttcacctgctgcaacttcttcctcagcatttgctgcttcaccttgtacttttctgttatggaaacagtttattttattaaacttcatgaatcaatctctgttagcttcaaacttttcttctacatcttccttacctctctcagcccttgtagaattgaagagttagggccttgctctggattaagctgtggtttaaggaaatgttgtcactggtttgatcttctattcagaccgcccaaactttccctatatgagcaataaggctgttttgctttcttatcattcatgtattcactggagtagcacttttaatttctttcagaacttttctcttacattcacaccttggctaacttgcacaggagcttttggctgttcttggcttttaacctgccctcctcactaagcttattcattccgagcttttgatttaaagtgagatatgtaactgtttatttcacttcaacacttcaaggaaattgtagggttattaattggcctaacttttaatattgttgtgtctcagggagaaggagacctgaggagaggagagatttctgggaaaagccagtcagtgaagcagttagagaatacacattattcattgattaagttcgccgtcctatatgggcatggtttgtggcataccaaaacaattacaacagtagcatctgagatcactgatcacatatcaccctaacaaatataataacaatgaaaaattttaaatattataagaattaccaaaatgtgacagagacatgaaatgagcacacattgttggaaaaatggtgctgatagacttgctcaaccagggttgccacaaacctgtgatgtgtaacaaaacacagtatccgcaaagtgcaataaagcaaagtgcaataaaacagataagggctggaggctctggagttgaaagccctctacatggagatgatcattgaagacatgtgatgtatgcagycactaagagagaagctgtagaagaaaaagctgagtgttggagaatgttgcctatggggtatgaagatgaaggggagctggtgactgagactgggtaggagcagtcagagaggtaggagacagaacaggagggggtggagtgaaggaaaggaagaaaagtaagggcttaagaaggacttggccattctttacacaaacaaggcagacaaattcagagcagagacctgggatagtgatgagtgggtttcttagtgaccatagtgagaatggttcattggcttggtgaggacagatgcttatttatggggctcaggaagaatgggaagaaagacytggattttataaatgtgtgctattcccttaagcagattggcaataaaaggaaggaaaactttgaaagaaacagggtaaagaaatgatctgtctccaaaagaggcaattgtcttggtcatccaggaggtaaaggcaaaggcttgaagatgcaggaaatggtggggacgatggagagagctggcagggatagaatcaggagcatggctggagggattggtctcaggaagaaatagagacactgcttcaagattggagggaaggctgggcacagtgggtggctcatgcctgtagtcccagcaattttggaggctgaagtaggaggattgcttgagtccaggagttcaagatcagcctgggcaacatagtaagatccccatctttgcaaaaaggaaaaaaaagttagccagacatggtggcacatgtttatacttccagctacttaaaaagtaaccctgactcttaaaaaaaaaaactgaaggcaagaaagagactgtgtgtgatgacctatgacatttcatatgaaggaaggaaaaattgagataattcacctagaattgcctcaatttttgttgagtgggcaatgaagctgtttgttgagaaagttagaagtatatttgagaatctgaaagggcttgaaaagttaggatgtagactgggcatggtggctcatgcctgtaatccctgcattttgggatgctgaggcaggtgggttgtttgaactcaggagttcaagaccatcctgggcaacatggtaaaatcccatctttattaaaaatatagaaattagccaggtgtggtggcactcacctgtggttccaggtactcaggaggctgaggtgggagaatttcttgagcccaggaggcagaggctgcagtaagcagaaatcataccattgcactccagcctggatgacagagcaggaccttgtctcaaaaaaaacaaaaaaaaaaaaaaaaaagaaaaaagaaagaaagttaggatgtgtattagagatgaaaaaggggactgtccagtgagggaggaccagcatttggactggttgagtggcttggttctacaaggtattatcataggactttccttagtgactgatatggtttggctctgggttcccacccaaatctcacatcaaattgtaatccctatgtgtcagaggaggagcctggtgggaggtgattggatcttgggggtggatttcccccttgttgttcttgtgataatgagtgagttctcacgagatctgagtatttaaaaatgtgtagcacatcccctttctctctctcctgctctgccatgccaagacgtgcttgcttccccttcaccttccatcacaatcataagtttcctgagacccccaagtcatgcttcctgttaagcctggggagctgggagttaatcggacctcttttcttcataaattacccagtctcaggtagttctttatagcagtgtgaaaacggactaatagagaaaatgtgacaccccagaattaaggcagaagaaatggattgggccagtgtaagratggcttttagtgaaaggttaagaatactaggaaatctcagagttcagagagaattcagttggagatggttgaccataggctgtgaaggcaagaggaggctgaacaaggttcctgtgaaatatccataatgacagagaagaaggaaagcacatttctggggctccaagtagcctcttagaagttggaaaattctcaagtcttaagttttaactttaaaatatttaaaattccagggctgggcctggtggctcatgcctgtaatcccagcactttgggaggctaaggcaggcagatcacaaggtaaagagttcaagaccagcctggcgaacatggtgaaaccccgtctctactaagaatacaaaaattagctgggtgtggtggtgtgtgcctgtaatcacaactactcgggaggctgaggcaggagaatagcttgaacccaggaggtggaggttgcagtgagcagagatcacgccactgcactccagcctgggcaacaaagcaaaaatccatctcaaaaataaataaaataaaataaaataaaataaaaaaatatttaaaattccagtgcsgatctgttaaaataaagtagtagatgctagtaggtgattgatttctcagtaaatagacacctaaaatatatatgccatatttttccatgacaagggcctatactgggtgggggtgggctgggaatttgtatcccagtttaagaagactggaagaacaaagaaaagtaagggcaaaatcaactactgagaacaacgaaggggcaggataaattcaacaggagggaaagagtaggaaatgttgaaaaatttgagactggcagatcttgaaaatgagacaatcctagttgataatgagctccaaagtgtaatcaagaaatcttccaagtgatggagataaagagatggaggctgtcttgggtgatttcaatctcattgaattgctcctgacttagattcaatacaaaatttctctcttgtggtgcacagaaaaaatattaatgtttaaaaagatgcatttgtaaaatgttaagccagacatttatttttaaacattgtcttgaagtcagagagagattaatagagccattctaaattttcttagggaacatatttggtatctgcctcctgttgtacaatctctaagaaaagtgagagcaagaagaactataaaattgaaatgccaattgtgatatcaagtaatttttaaatgaatgcatctttcaattcattgataggataaatccttatttactttatccgtgagggtctctgtcttgaacaacaagcagccaatttgtggaattagtggctgtttcaggagggtaagtaacctctcatttatgaccatctcgttcctatgttttaaaataagattgtggacaaatacttccattcaacctagtagatgcattttggcaatggcagatcacccaaacaatggataacaatagcaaaagaaatgatatagtcagaagtctaatgttagccatttgttcctagagtttcgaaatacagtcagttcccaactcatgatggttcgacttagaatttttcaactatttttatgatggtgtgaaattacatgcattcagtagaaactgttcccttcctgttgaattactctgtcccttcattgttcggtgcagttgattttgctcttccttttctttttttttttttcactttcactgcagcatttaaaattacaagagatattcagtactttattataaagtaggttttgtgttagatgattttgcccaactgtaggctaatgtgagtttggagcatgtttaggtaggctaggctaagctatgattcttggtaggataggtatattaaatgcatttttgaattaatgatatttcaacttacaatgggtttattaggacataatcccactgtaagttgaggagcttctgtaattataatatcagatattgatagcttccattggtaagtaacttcaatatttcccactctttttttaaaagcttgacgagcatacaaataataaataattaatgtttctagtagaaaagaggtaagtaacaggaacagaaatcttggaccatcttaaatgaaccaatgggaatgtcaccatgcacatccttccaaactttgtttcaagctatttcatgtcaaatttatgcttatacaagtggaataatatgtatgttatgtcttatgttttaaggaagtcttgacttatggagggtgagcatttagtctcacttttaaactaacttaggaaaatgatctaaagcatagtgaaaagaacaatagagcaagaggaatgaggtgttagtttaatgaaatagtttagtgaaataatgccaaggactaatatattgaagagatatttctttagcttggcatatttcaggaagcaagcgggtgcatttaataaattaaatttttatttaattatttatttttatttatttatttttttaaagatgaagttgtgctgtcacttaggctggagtgcagtggtgcgattataactcactgcaaccttgaactcctgagttcaaacaatcctcccgcctcagcctcccaaatagctgggactacaggcatgtgccaccatgcctagctaatgaaaaaacaaaaaaaagtttatagagatgggatctcactttattgtctaggctggtattgaaatcctggcttcccaccatcctcccaccttgacctccgaaagtactrggattacaggtgtgagctgccatgcctggcctggccttgcttttttattttttagcttttatagctccatatcctctaatgccaccacagtatgatgagtggaaatttgggtaccatgtttagcactgattttctctcttggcgaggaggcaccactatcacgctatgttgagtttttggcagccaagatcagagggactgtcttgtaatggccccatccctgagatctgtgggaataacacaggagacaggcactgactgcttccaggggaagcaacaatcagtgcactgaatgccttaccaagctgagtatcgctgaacttcaaaacagtgccagaggagtagagtttttttaacttcctctgctctgtcaacagctgacttagctgatttttgcctgtgatgataatatccagagtgatgactggattctcataatctgcttctctactgttaaggagggatttttacctgatagcatttctctaattttacttattttattaattcttctatgccaattacttataaattttggcttatttctgatcacactataccatttgtaaaacatgaaattcaagttgattgattgctataattttctcccatccatattctggatgaatcaaagatgaggctggcagtgtttctttccctttgaaaacacttggttcattttcacaaacagaaaaattacatggcttcctggagacattgatttgttcttctggaagggttggacctccattgagaatcactaatttaacaaaaagcccacagatcattgtatgagtgtgtgtgggatggggagggggagagagagaaagaaggaaagaaatgggttaaaatttcattttaaggaatcattttattgttggattagaaactaaagactgtccataaaaaagaggaaccattctaaaattttcataacttgctgtatgtgtgtattttatttcttaataaagctcaagtagtttctcatgaaagtcaatggatagagagccatttcaggacktgtttgaattggcagttggttggagtttggccatggcaggaaaggacagctgtttgttgtggggccttgtctccatggtgttgggcagcacatcttcagctctttctgggaagacctcaaagtaggaatagaccaagaaaaacagcaagagggcatgactgcatgctggtcagatggaattcagcctgtactgctctagcagagcttctccaggggttagaatgttttgcttttatagtcatctggattgtttgtttactaagggtagaaaggtcccagcctcacccaagacctcccgattcagtctctgtggggagctgcttgggaatctgtatgttagagaagctcccaggataattgtgatgtgtggtcatgtttaagagctgctagtgtaaataatggtgaacagtagcactggctggaagcactgtagaaattgtgtgtgtgtgtgtgtctgtgtgtgtctgtgtgtattgtgcaagagctatgagataagatcaggctactggaatttgccaagaagcagcacgggagacacattaactagacgccaaggatgtggccatagactttcctagaaactccctcatctagggtgtgcacgtctggattgcactgactagtcctgattaaatcctgtatgcataggctcagtgcaggctgggctccagaaaaggccatccacaatgttttcttttaaaattccatatactatttatctttgattttctacctcctgcaggaatccctagatccaactttctttggtgagtttgcaggggtttctgatggttctcttgtttcacgggtttccttcttattttctactccttttatttggaatgtcaacctacaaacttaaaagattgagcaaactttgtaggaaaactacagaagttggaaccacatatgatgctttctattatatgcccaaagtctgttgtatatgatgaaaatgaggttttatttacttcttggtacaccaaacacaaacactctctaatgaggaaaagaacccaatgagggggaaaatgctggatgccaatggatggcaatgatttatggaactctgggctcagtggtagtgaatgatcatcttaagggaagacactattctacagttcggtgtagctgggatgactttatatcctagtttgcaagacagtcctggcctcacctgttgagctggtgtcccatctagttaagatacctttcatgctccccagtgtcctggttgagatactccgtttatgtggtcaccgtgaggataggaaacagagagaggagatttttctttggatcactgaatagtactcatttcattatatgatttatcccattccaggctcacccctaacatttgagggcccaggacaagacccccctattccacaacctattccttctcttcttgccctggctccactgtgcaactggaggatccttgtaagaatgtgtgtgggtgagccagcctgctcattcaactttattcacacccacatccactagctgcccatgaacacccctcaggcctaggggtgcgcacacctgtgagttgatctgcttcgggagggtgaagacacacccaggccctggaagctggtttcggaccacttggggcaggaaattcaagggtcatgagtacttggggaagagtctagaagggaagttgtscctgcaggtgggtatgtatcacagccctgcagactgctggttccatggagaggcatggctggagaagggcaggagagggcattctgaagcatcagccccctgattagggatacctggccctagagtggtcctggccttttcactcctgcttttcagagatcctgcttctaacacatccttgagcatctcagtaaagcaagcttcctatgccattctgaagtgtttgggttaagaacgtttctcatgtgaataatgcttggtcaccagactgaggtccagcgtattcttcatctggtctgatagaaatcccttgtctttaaatgtcatatatttaaggtaacaactctattttgtaggttgaaacaaaaacttaaactgtatcagttaatgtttttaaagtcaaccaaagggaaggcacctcttcccagtgtgtttcatcaattgaaatctggtgaatgtttttttgtttgctggtatgttccaccatgtgtgtgagcatgaaggtaggaaaactgtttgctcagccattccctctgtggtttggtttgttggagaatcagtcaaatggaaaggctttcctctgatgtgattacagaatcaaatattttataattcccagatacttctgaatcttgaataattattaaagtcagtgaacactttctctttcttttccttgactccctttggattgaactagcccgcagggcaacacaatattatttccctgggctaggtgcactttcctcttcgtggactattgggtgcctgtagatagagtccctgtgcacagcaggcagattgtgcaccgcatagtcctggaggtaaatttcaccaagagtataagtgggattgtgcaaaatggtagccctgcctatgcatgtttggggcagggattccccccaactgtgtatttcctgggaggcctgattttcctcctctttctgtcacccatcataagcatatggagaagatggatgtttgaagggaaaataatgttattttctgcattttctcccattttttgagagcactcattctccttctaatattaatttagatcagggaaaataaaagccatttgttaaagaactaactattatataataaattatcaaacaattacgccaaaggtatgtttacaaactcctgttctatcttggtgggttgattagcttccttggggggtccaaacagctatggcttttccatttttataaatggttctgcatttataaaattaagaatggacatttatgctattaattaagaatggaattaatagtgtaaagggatccttcaaatacccatgtgttattgctcaattttaaccaataaatcttataccagagtgttctgcctgcttccggatgagcaaggagacttgtggtctggttcttggacttccctagcagcatggcccccaaatgccagtctccactcctgcctcaaaagaagaaaccaagaatgcctcctgctctgggaccggaggagacattggcctctgcaggcttgctgaggaagggagaaaaagaacagcaagaagcaattgaatgcattgatgaagtacaaaatgaaatagacagacttaatgaagaagccagtgaggagattttgaaagtagaacagaaatatgacaaactctgccaaccattttttcagaagatgtcagaattgatcgccaaaatcccaaattttggggtaacaacatttgtcaagcatccacaagtgtctgccctgctggaggaggatgaagaggcactgcattatttgagcagagttgaaatgacagaatttgaagatattaaatcaggttacagaatagatttttattttgatgaaaatctttactttgaaaataaacttctatccaaagaatttcatctgaatgagagtggtgatccatcttcaaagtccactgaaatgaaatggaaatctggaaaggatttgatgaaatgttcatctggaaaggatttgatgaaatgttcaagtcaaatgcagaataaagccagcaggaagaggcagcatgaggaaccagagagcttctttacctggtttactgaccattctgatgcaggtgctgatgagttatgagaggtcaccaaagatgatatttggtcaaactcattacagtactacttggttcccgatatggatgatgaagaagcagaatgagaagaagatgatgatgatgatgaagaggaggaaggataaaaagatactaatgaagaagacaatgaagatgaaggtgaagatgaagatgatgatgaaggggaggaaggagagaaggatgaaggaaaagattactagaacactgataggttccaactttcctgtttaaaaatttttctccagtccctgggagcaagttccagtcttttctttttcctcttgtgctctgttgccctgttgttgaggtctctttgctctacaccatggttctcaacttattgcagaatacaatgggaaaagtgtctctacgcctttctgtttgaaattcatttttatccctttctgtctgaacaaaaactgtatggaatcaacaccaccgagctctgtgggaaaaaagaaaaacctgctcctttcattctgctggaagctggagggtgctaggcccctgtgtagtagtgcatagaattctagctttttccctcctttctctgtatcttgggcttagagagtacacggtgtctctatgtgaatatggacagttagcatttaccaacatgtatctgtctattttctcttgtttaaaaaaagaaaaaaactaaaaaacaaaatgggattatagaaggtcagcaaagggtggatctgagatgtttgggtaggttaagtgggcattttgacaacatggcttctcctttggcatgtttattgtgatatttaacaggcatctttgtagtttaagatgacacttttaaaataaattatctcctaatgatgacttgagccctgccactcaaagggagaatcagaagaacctgtaggatcttatttggaattgactttctctattgtaattttgttcctgcttatttttaagttttctttttgtttcactgtaaaggaaagatgatgctcagttttaaacgtgaaaagtacaagttgctttgttacaataaaactaaatgtatacacatacacacacacacaacacacacacacacacacacacaaacttataccaaaatcacaccactttagttagttgtccactggaaaggtgctctttgttttcgagcttcaaagaagctcgtcttcttttatttgactgtcgctagggactccactgagcaggaatgactattctgatatttgcttgttacatttttggttttcagaggtggcatattgaggaggtgcacttatggattgcagcataagtatccatgagtccgggtgtggtgcgtgtgctcactcattatcttgatgtgctgctcactaccacgtctctcctttacactattggaaactttcattcttaataatttaatttatccctagtgactccagcctcccatgacagactaaaaaaccagacttgatgaagtccagatatattttaattctcttctatcaagcccaagggagaatttcttagcgactatgctgacttatgtcttgaaaaaactttaactttgggaattttgatgtataatgaagccaggagagggagacgtgtcattccaaaatgctgcgaatagaatttaagcaagcaacatgacacacattctttgtttcttttgcttttttttttttttttttttttttgcaatgaagtctcaccctgttgcccaagctggagtgcagtggtgtcatctcggctcactgccatctctgcctcctgggttcaagtgattctcctgcctcagcctcctgagtagctgggactacaagcatgtgacaccatgcccagctaatttttttgtacttttagtagagatggggtttcactgtgttggccaggctggtctcaaaatcctggcctcaagtgatccacccgccttggcctcccaaagtgctgggattacaggtgtaagccactgcacctggccatgacacatattcttagctattctccaaaagggagaacactagaaaagtggtaatttgaaaatagaaactgtccagtagcaactggatggctcatagctccagtggttctaataagcgctcagtggagagtctgatacatattaggtgctcaagaaaatatttgttaactgaataaacaaatcaatcggatcttgttcagagaaattccaaagcagagaatatctgccacaagtgctcacatcaaccatgcctattaagcagcaccatgttgtttgctctcgcagaaagggatttgatttggcatttgctgaaacaggcccccatcttacagacggcattgagactcggaagagttaaataatttcctcacagctactaagcactagaactagaataagaatgtgtgctttctgactctgagtctaggattctaggacttcaagggtttcctatctttttgaagtcatggggcagaacaatataaaggaacagctggaaaaactgaaatgaaattactattcactcttacataggaagaataaagataactcttgagggccctgatatattatagtaataaaaacaagactgaggtagcagaagcacatggacatgcagggaacacttccaaacatccttcaaaaggcctaacttctaaggacaggaaacatgaggaagcagagaaggaaggaaatgtgtctaaattcttccaagctgtttcttttactattcaggccaagccttctatctcttaaatcaaaatttcagggaaagcttatggcagatgagacttttgggagtacattagaaaacaggagggaaaaaggccttattactcactgatttgtatccttgtgttattttataatattattaaagctctttccatgttatatagattctgtctctcagctgtactgcaaatctattaggacaagtctcgtctcttttatgtattccttctactgtgtctatatgtggtggtctctcagtcgagcaggctgtacagtttattcgaagtgttccaaggagcttgtgtgcctccactgctctgacctcatttttgcaatgttaattaagttgggtagatgacctattcgactgataacactcactagctcactagtatatggtaagtagtttattctcttagttagttgaccgtgaccagattaaagcccaaaaagacaagaaaaaaaatcaggtggtagagagtggggaacagaggtataggacactgttttgggaaagtggatcttcttgtgttcctacagaggataactcgggcwtgtcaggatgaggtattacaagaagagagaacaagagrggaggctcaccattaaatttggcttctggccttgggtcagccttgcatgatgttttgtagactgagagtaaggaaggagaagttgagacaaaaactttactctctgtttggtcactgagagtaaaggttctctttgtgctagcttattcttaagcagtatgcatgaggcatttaggggtttattgctgaagaaaattcatcctcttgtgctaattgggcagggattccaagggattaaaaccaaaatcatttgaccacctgagttacagtaattttagagcttaggttgtttattttcactgtatagcacaaccaaatactattcagtctggctgcatggaatgagatatggctaattagatttcctggctaacccaggttaaggcagaaatgccatgttaacagtagcacccttaaacctggggaaagaggctcttgcctcgtgtcacttgctttagagggccctactggtcttcctccactgtgccatgccttatggggagacgattctgcagagccatgtggatattgtcaatccaaagcaccccattccctcttctaaaccacttggtaccccacaattcctacctaagtgatcccaagatgacttccagggcctacgtgggtctctcttgagttctcatctcccgaaggtgaactgtaccacttgtgttgagcactcctaggaccaaagagtgtggggctgtgcatgaatcttagatgtttgggctgagatgtccttgggggtgtgtgcaaggcccctcactgcagaaaagaactgaaggtggggaagagaagagaagggagtgggctactggctggagaaccctggctccaaaaattttaggcatgggctgacatttctaactctccagtgggaaaccatttaaagcagtcaacacattgactacgaagtgcaggcactactttgagtaactagacttgatcgcagaggtccttgaatggcctcctggtctgcatgtgtaacaacagtggttattgttctctggactctaatgctgtaggtactagatgtgactgttctccagagacattcctagggagttgctaatggtggtggtggtaattgctattattatttcatgaacattgaaatcttttatttttttgtaaagttgtctccttgaatactggactgtaaaggtgtgtggatgtgttctagcaaattgagaattgtagttaattgagttctggttatttaactttttactgtagtttgtacttgttgcttgttcagagtctaggcaattttacatgggcttattttatcctttctccctatctccattagtcttcaagatcaggaaaatgatttatgtcattttaaaatagagccttcctctgtctctcattttccttcttctctctctctaaggtatattattgcctactatatcctgtgccctgtgctggaatttctcttgtgctaatttttattgataacatatgatggcttaaaatgtcatctagtgtttagtaaattcataatagaaaataactttgttccctcacaaatttttacagacatttaaaattagcacttcaatatccaagtattttgctttttcttttctggagagaaactaacacctgtaggtatttgttgacatgcaaaaaatgcatgcaagaattttaaaattttataccctataattggttgtatactattaattagacctcttctttagctctcttactgtatacactcttctgttttcscaaattctctcctctttctctaaattcctcaccctgttccccaccctttccctgccttgtctctgggtttttgtctctcttgcctcatttttccttctttctctctcactttcttcccccaccccttctctcttgtttacactccccgctcatgtatgtgccgcttcgtctttgtgtttatatctaccaggggaaagaccaaccatctttatttttaaattttattttactttaagttctgggatacatgtgcagaatgtgcaggtttgttacataggtaaatgtgtgccatggtggtttggtgcacctatcagcccattacctaggtattaagccccgcatgrgttagctatttatcctgatgctctccttcccctcactgcctcccaacatgccctggtgtgtattgttcccttccctgtgtcatgtgttctcattgtttagctcccacttacgagtgaaaacatgtggtgtttggttatctgttcctgtgttagtttgctgaggatgatggcttctggcttcatccatgtccctgcaaaggacattatctcattcctttttatggctgcatagtattccatggtatatatgtaccacattttctttattcagtctatcattgatcggcatttgggttgattccatgtctttgctattgtgaatagtgctgcaataaacatacgcatgcgtgtatctttataatagaatgatttataatcctttgggtatatacccagtaatgggattgctgggtcaaatggtatttcaggttctagatccttgaggaatcaccacactgtcttccacaatggaaccaaccatcttttaaagtaacaaatgacatctaagtgtgaagtccgaagtcaaagagctagagagtcatacagtttcagagttgtcgcagttttgatgattgattctctggcagggtcgtcctcattttgtacctgaaaatatagttctagtgaattatatcacttgtccaagcccacacaatgaccaggcttcctagccctgatttatcagtccagtccttttcttaaaaatagtttctgaatatatgcaggtaaaaataataaataagccatcataagttacagacatgtatgtctgcttctatggtgccaaggaaagaaaacaaggggaaggcatgaacataaaataacacaggtgcacttatacattgtttcttcaaaagatcatgaaaggatagcttagaaattgccagtaagaactatgacaaacaagctcagacaagttactgcagagaggagtgtacttaaagttagaaagcgggagaagtacacttgtcaacaggcagaaaaggaggagctatggaccttacaattggaaaatgtgattaaaaaaaaaataacgaagctgatccttcttgatttttcttgttttgaaatttatggcaaccagtacaacaaacctatttgaatgtataaattaaaattagtatactgtgatttacttgggctaatataaatgtaaaaccctttaagctagaccagctgtaattatattcccaaagatttgatttttatcattatttacagctaataagacatttatgatctctttttggttgtctctgttgaagcattgttggcaatgctttcctgacttgaagttctcatgtgtgttgaaatcgaattaggaaaatgagtaagtaaataacttatcctaagagtataatctctcctttgtgacataaattagaaatccattcacatctgtggaataattcccaggtttgcgactacacaatctgatatgcacaagcaaacatgccaatcttttctcagtctaggagaatttggtcactttctacttgaacaaaacaagctatatgtgcttttaaatagatgtatcattttctcaaaattggattataaagagctgatctgagctgcaatcagatggataattaaacagcaaaggtaagaggcttctgactgcccatgtttacagtgttaattgaaaaaataaaaatatgatttttaatcctaaaggtaatttgaccaatgcacatgtacaatgatgtaaggttctctcactttccattttaatctcaggattgtggaggcatttgaacctagctttctcacagagaatggaagaagtttgactggagaaatctggccacattttacgtttttctggggtgtgtatagttgaatgaaaacatgaagatgctacttttaaacaattttttaattttgttttttcttccttcagctatgatgctttattgtctcagatctgtttaatcacctggaatactttttcgagtgatttttaaaatggcaagaaatgttcccttttccataatgtagctgttgcctctgaaatgccataggtgtttgcattttttaaatcctcatttgtggcagttattacgttttgcttcatgttatggtaatttggcatgcaaacatatcttttgtaccaaattttaaactctttgaggacagggttcatatcattgtcttctttaccctgggcttttcactgggttggtgaaatgtttgtggaatcggtgaatgaagataagacatacattgtcttctgagagtgggcagacatgtggcgggctattgctggataatgtgctcataatatcctgcagattaatttggttctttgatggaaaatgaagtgaaaacatgcatctgcagtccaaccttttcccaatgttattcaaaatgtaattcaatgtgatcaattacattgaaaataattgagaaatgagatgacacttaaattagttgaagacaattgtggattttgcccttggttctttggataagtaaacttttagtgttttctcagagatttacaaaattccaggggctgtgtattcttgcctataggacatccaaatcctgaggcttttcttcttatcatttctcatttaactgcttattaattctttccaagagaaggaataagaaacatgaatttttgctgttaattgaaccatcccttaaaactgtttggactgtcttttgggctattgagaaaaactatttggtcacttttcctgtttttttgagagtccaggtagaagaggtctttattattgtcattacatagttcataataatatttctgtttcacttttacgtagcataacttttcaacaaacctggcaaaacatcatccaggcattctggtcagtaaagatcctgtatcagttgtgctgtaagacattattgagccgataatgtaactggtccagtttcccccttttgtctctgtagagagttcggcagcatagcagagggtcccatggaagtagggataaaagggaattcttctttggcttttaaaaatctctcaactccattcaaacttctgcaagttttcctccttgggagatatggagtggttccaacatccttaatatcagttgccttttggtcaaattccacctttaatcccttctaagaatgggaaaataaagacatctattatgacgtcctaaaggcctgtagttattgagagagcggccaagactagaattataacttgggcctctgctattatgaatatattgcttgctgtgaactcacttggagtaaacttgtgttattatagaagtagcaaagaggccaaaaaagagacaggggcaaaaagacatgatcatcacaaagaaaagataaatgtttgagctgatggatatcccaattttcctgacttgatcattatacattgtgtacaggtattaaaatatcacatgtacctcccaaatatgtacaactattacatgtcaataaaaacagtttaaaaagtgatcaaaaacagtagcagaaatatattccttatgtaattttcatcgcatttgagcatctaggatttttgacaagacactgggcttccgtctaccatagggtgcttaggaggcctagtgatctccagaactgtggggtgtcagttcaagagtctgctccaagaatacattaagtgcttacttaatgcagagcactatctttaatgctttgaagattataagttctatttttgacccatcttctatgttgggccatttatttttatgatttttgcttctgctttgtcatttatatgtaggcgacagtaatagtaatggcctggtaaccttacagggaactgcaggttgatggtggggaagcatcttattctaatatacccatataaagacataaagatagcatttatatatttgtagtcaaatcattggttcatcctattttctgcagttgaagatagatatcaccatgtatatggccaattatctttatccagttcaatttggccaggtcaatgaaacttgtatttatgtcatactcttgtgtcatgggagatagaagaagtataatagtggccctaatttacttttggtaaaattgaggttaagtgattttcccaaatttattttgatataaagtaaattgcagatacaagttttttggtctctaaccttgtgttatttaattgttccacaaagaaatgctgcatattaaaattatggttttaaatggctcactcagcccttttgtccctcccttctccaagtaaaacaactaacccctatttttcagtttgttgtgaattcagtttgtccaaactaggctggggataggttaattaaataattatatagtgattaacatggggttagaatttatgtcagattggggcaaaaccaccttttgaatacctagaagatagtgaaatgtacttaatactaacattgtcatgaatatcaatcacaggtttagaagtcttttgatatatatgagctaaatatggggttgaatccccaccaatcatatcttaacagatttttttaaaaaggtaagtatctgaatcagctgctttattttatttgtctctttctcataaaaatgacaataaaattatggtatgtgaacttctgattatttagattccagttaaacaggattttactttagtttctttttttttttttactgaaaaaaaattttattgacttgttttttggtgtatatagttctatatattttaacacatgtatacattcatataaccatcaccacaatcatatgaaaactcttttataaaccctcaaactcccacatatgacttctttttttttctttttatttatttattattatcatactttaagttttagggtacatgtgcacaatgtgcaggttagttacatatgtatacataccatttgacgcagccatcccgtcactgggtatatacccaaaggactacaaatcatactgccataaagccaggagaatttcttgagcccaggagtttaagaccaagcttggcaatatagcaagagcttatccctaattttattttttattttatttattttttattttatttattattattatactttaagttttagggtacatgtgcacaatgtgcaggttagttacatatgtatacatgtgccatgctggtgcgctgcacccactaactcgtcatctagcattaggtatatctcccagtgctatccctcccccctccccccaccccacaacagtccccagagtgtgatgttccccttcctgtgtccatgtgttctcattgttcaattcccacctatgagtgagaatatgcggtgtttggttttttgttcttgcgatagtttactgagaatgatgatttccaattattatgaagagagagaataatggtttctcacttttcaattccatttagaaggaggttgtttctttcagaacaccaaatgaagctttctcagtggccatcctataggacctttgcacttgaatctctggtttctgaatttgggacattttaaaatcctaagatttttccaggtgatctttaaaaatgggatctagggagattttagcaaattaatggtttctgtgtttaactcttttaaaacatattttcatgatcgtgtgtgtgtgtgtgtgtgtgtgtgtgtgcgrgggcagttgggggggtgggtgaagggggatatggggagaacaaacaataaccaaagaaacaatagtggaacttaaaaatattttctactaacttatttgctaataattattcaggcagctttatgaaagctctttggaaattctagaagtgtttccatttcaggcttaatatatttggatcataaataaatatcagataccttttggaggcattagaaactaaacattatgcaaaggctaccctctgttgcgtcaggagcttgaattgttttcattaaaatatctgctatgaaagcactgagattagatgggatgctatcaaatgtcagagatttgtattcttggtagaaactgagatttcattttccttcatcccattctgatgctggcttccctgaagcaacactcctgttccagatttgtatgcttgaggtaagtcagaaaaggaatttcggtgaggcatgagtttgttgatgaaacgtgggggaaaaccaaatggacatcttcagaatgaaagtgtacgtctttgtctgtctgaatgtgtgagaaagaagaacactgaacacagtctaaacctcctgctggtgtgattattgagtagtgttgatggccaaaatatgaatgaaggtttttctgttgcaaaatgctttatgttatgtgcagggcagacatctgtgtgcctgccttaaatttatgaactaataacattctgttccaagaaatcctgtcaggtctttaacggtaccattttgttctgagttattctggtaaatgaatgattttgcttttaagtaattattttttgaatttttaaatataaagtcacatatggtttaatgtatggagaggatgcctttatcatcaatgaaaactttaagaattgactgattgcattttattttaacaaaatatcattcattattttcttctatttggaacagatgtaaatgttccaatctattttggattcaaatgaattttgaatcaaatagatttaaaatgaatctattttgaatcaacaaaatagattcaagcaagttttatgagtgagattacagatgaatgataataagcaaaatcatgagaaaacccaacccaaataattgagttagactatactataaacaaagtaaatttaaaaacatatatcctcaaagaactgtggccagtaagatagatactctctgaggctaccctcctagtatagtaacggtaattctgctgaaaccaattaggcactgttgaaagcaacttctcgctgccgatgaagggactggatcctgtagcttggtgtccttgtcaagtcctcagtgtgtactcagcttgcccctgctaatacacactggtcttaaataaaacagagtggcaaatatttagagtgagttttatgtgtctttgggatttttccttccccgccattggtaaatagcacgtttcctctgcagatctgtgacctttgagataacttcccttgttaaacacacactgatttgtgtgggtatttgttttctttcttttttttttcaaaagctattccttcttttctactttatattcagttgctttcaacacagagtaaagtcttctgatgaatctcttgtctgtagttttgaaaggaggggagaagcaaaggaattagcaatcacaaagataaacctgcaaaggcaaactaagtagaaacatgtttttccgttgcaaattatgcttaactactataggctgtaatccctatgctgacatatctcagaataaaatgtaagttgcttgagatgctattctgaagcatgtgatatggttttattgattgataaatttatccatatgatgatagttgtagattttcagaggccccatatggaccatttgaaatgaaaatgttatattggcaatggatgagaacatgccacttgccctgctccatacaaactttgattcctagcaatcagcacatgttagagagctggaggccacggtatggtgtgcaagtgctcctgtgctgaagtgacaccagaacaatcaccacattgccatcaggccgtccatctgaggtagggttttccttcttgtttcaatctttatcattcctggagaatttgccaaggcccccagggcagtgctgaggcctccagcgccccctacaaatctctttttctgtcccttcaacattttcaggtctaactacctgtagttttcctctctaatttctgggccaaagcttggcagggggcaggcgcagaattaggttgaagaggccagtatgagcaggcataccaaggtccattgtgctataccagaggtgttacattagactaatgaagggattatagaaacttagctctccatctgaattctcttattaacacatcactgtgaatcagcctgctgctttcggtgttgtgtattttttccctttgttacttctgttactgctaacgatattggtatcatttgttgtatcaatgcaactgacttgtacttcaaattaatatctcaaccaacctagaatttcttgtctagctatggtaggtagtatggggtggtagtggtgttgtctcaggctagtatatgataatatgattttgaagtctgttttcccccccatttaacgaactagtgtgaacatctatccatgccttttaaacacttttctccaagataattttttatagttttttaatggttaaataacattaacttagccaatgaaatttaaaatattttgctactgtaaaaattattgtgtatctcctggtagttaaatcaggattatttccttaggatgcagagcttgtatgttaaggagtatagttattcataaaggtttgatttttttggccaaattgctctccagaaagtttttttccccttcagtttattctcctaccagcagtgcatgagagggcacattttcccgtatcttaagtagtgttgttttctaaaaatgttgccaatctgatatggggaaaatggcatttcactgtggtttttctgtgtttgttaagtcactagtgaggttgggtagttttatcctttgcaaattgcctatcaatgttccttacttatttttcttttgagatgcttattttccaattaattttactgacaatttttatatagtacagatagtaatccatgtgtctataggttgtttataatgtaaatatttttttccaagtttcttagtcactttttgactttttcccttgggtatatttttacatgagaagtttttgtgcatgtgattgagtcttttttaattgtggtaagaacatttaacatgagacttgccctttaaaatgtgtttatgtctataatacagtattattaactatgggcataatgttgcccagcaaatctctaggacttaatcattttacataactggaactttataccctctgaatagcaaatccccatttcccccttccccagcccctgggcagtggttgagtctttgatgttttccttttaaagtttctgcctttggagttagtttagaaatgacttcatcatcccaagatcacacacacttttcctacattttcttccagtttctttattttacatgcaaatcttaatccatctggaatttattttgttgtataggagtgcaagaatttaactttatatttttctcagatagttttccacttgccagtggaataatgatttgttgaataatctatcctttgctttttaagttttaccttgaaaaaacataatataaaattttggatctagttttttaatataattcattgatttctctttttgttggacagcataacattgttttaattactgtaatgcagttaaacatctgatagcttgaatcattcttatctttttcaaacatttcttggcagtttctttcatcatctcctgaccagatggtcgtcataatgtcttaattgctcattctaccattggtctcacttgcttctaatccattcacaacaaagttggctgaattgttgttctaaaacacaaattggatcacgttacgccctgcttgttgtgtatacatacttccagctatttttatcaactaaaaatgagccctttgcctataacaagattttaacctgaagtccaagcaatttctgaacttcagagtgtttgtagacaccatttcggtgattttttttttttttttctgagtagaggattgatagcatcatagattttgaaagagccatgactccaaagcattaataacctctgtgccacaggaagaaagtcagaccccccagaacggcttgtcagtagcaggtcctcccctggttgacatttctttcttacctgcctgccctctccctgaccactcttccacatccccacccttcccctcctggactgcttgcaattgtctatccagtctgctgtttcacaccccagtgcctttttacatgttattccttctgccaaagtgttctcccacacatacctcgcccatctggaaaatggttccttgtccttcaaacaacaatcaaagagcctcctcctctatgaaactttgtctgatccccttaagcaatgctgatctctctcctttatttttaaccactgtacttaatctgtattttaccgtgactcttctactcttcctcctctactggtactataatatctttgggaataaggactgtgtttttgtaaccacagagcccactgcctggcatagcataggcactcagtgaatgcttgatgaacagaagaatggatgcaaacaatgaatgtatggcaggacatagccctggtgaaatcactggcaggggcttgtgtgaagtaactgcataagaaaaaaacagcatgctgttagaggtgaagggaccagctttgagtttaacagaagtaaggacagaatgggtgaagccataatgtcaactttgaaatatcaccatttattaagaaaccacatttgaagttctaggatccttaaatgaaggcgcttttcaccaaatacttttctaaatttcctggggtgtttataacatggaggacctatttcctgagctaccagagtcctaacacatacctaattatgagttggtcaccaagagttatcagtaatcacaagtaatgaaagcatggctttgggtgagtgggtgggtagggtgggtgaggtgggatatgccatgttttggaccaaagctgtccacattgatgtgtagccattgttttcatgattctagcacccagtggatgttgagtaaatattttgtgagtaattgaatgctgagtgtgtagctgggggtatgacagccagctaactgtcatgtctactttctcagctctctgagatggcaatgctaattttgctggagaaagtagcatcactgttttacttggttccctctcttcatactgcctaattttagctagttcttattattacttgctttgtttacttcttggattctttatcgcattacctgtggtgtcacccactgtcttactctgggcaaatgaaccttgtttttttgagaatgttaagttcatctgacataagccgctcaatttcactcctcaaattcttctacatcagcattcttttctctaccctggggaaaaagaacctcctcatttaagtgtgctttctcttcttcttaaatattgcctaagcaactttttaacttttaatctctcattgtccatttacctctttctttgtttgcagacatcattagaatctccatccttgaaacaactcaataaacaaaaattttgcttgactttactagttgaataccttaacgttcacttttctttttacctccaaacttcttgaatgacctatgaccactatctacaccttttcttcatacactgaggtctggaaatctttattacctggtttcttctctcagtctccaaattattaaaaagtcaatttctcagttttcatttttcttcacctcttgataacacttgaaaccattaaaattcccctttattttgaatgggctctttcttaatgtctatcacactcaactgtctatttgctcgtatctttctgttttattttctgtttcttccgtggtcctctttctgatgtcctgagagtggatattaagttgcaccatgtctgcagggatgacaccccaaccctaaccttcaagtcaggcctctttcctatgttcagatctactgtttctggaaagctctaccatctgccccacaaaagcttcaacattaatagaaattccgtataatttaaaacaaaattccacctatattttctttcaaataaatgtttaatttgaaatatttacattaatgatgcaaccatttttctatccacccaaacttgagacctaagaatgagttgtttgctgattcttctctcatagccaaccatttcaatgttctctgatttctactgttacccaggctttgctttacattcccacttttatggtgcttatctaaacccttacttttggcctttaatattgtattggctatttatttattattttattattatactttaatttctgggatacatgtgcagaacgtgcaggtttgttacataggtatacacgtgttgtggtggtttgctgcacctatcaaccgtcatctacattaggtatttcctctatccctcccctagtccccccaccccctgacaggccctggtgtgtgatggtcccctccctgtgtccatgtgttctcatcgttcaactcccacttatgagtgagaacacgtggtgtttggttttctgttcttatgttagtttgttgagaatgatggtgtccagcttcatccgtgtccctgaaaaggacatgaactcatccttttttatgaccgcatagtattccatggtatatatgtgccacattttctttatccagtctatcattgatgggcatttgggttggttccaagtctttgctattgtgaacagtgccacaataaacatacgcgtgcatgtgtctttatagcagcatgatttatagtcctttgggtatatacccagtaataggaatgctgggtcaaatggtgtatctggttctagatccttgagggatcaccacactgtcttccacaatgattgaactaatttacactcccaccaacagtgtaaaagcattcctatttctccacatccactccagcatctgctgtttcctgactttttaatgattgctattctaattggcatgagatggtatctcattgtggttttgatttgcgtttctctaatgaccagtgatgatgagcttttttttcatacgtttgcagggggcataaatgtcttcttttgagaagtgtctgttcatattcttcaccctctttttgatggggttgtttggtttctttcttgtaaatttgtttaagttccttgtagattctgaatattagtcctttgtcagatggatagattgcaaaaattttctcccactctgtagggtgcctgttcactctgatgatagtttcttttgctgtgcagaagctctttagtttaattagatcccatttgtctattttggcttttgttgccattgcttttggtgttttagtcatgaaatctttgcccatgcctatatcctcaatggtattgcctaggttttcttctaggctttttatggttttaggtcttacgtgtaggtcttcaatccattttgaattaatttttgataaggggtaaggaaggggtccagtttcagttttctgcttatggctagccagttttcccaacaccatttattaaatagggaatcctttccccattgcttgtttttgtcaggtttgtcaaagatcagatggttgtagatgtgtggtgttatttctgagcctctgttctgttccattggtctatatatctgttttggtgccagtaccgtgctattttggttactgtagccttgtagtatagtttgaagtcaggtagcgtgatgcctccagtttgttctttttgcttaggattgtcttggctatacaggctcttttttggttccataaagatgcttttcctggctttagttgtttcttctctaggatattctttacatcgcaaccagaataagtcatcaaaggtccaattatgccacattcttgctcaaagatcttcaatgaatcttgatttctatgtgataatggttaatttcctacatgattaacatgtactctgaagctagactgcccggattttgatcctggtcccactacttcctagttttgtaaccttggaaaaattattcaactcctttgtgctttagttgcctcggtgaaaaatggggataatcatagtgctgccttatagggttgttgtaataattaaatgattatcctgcacatagtaaacagtcaatgaatttatgctattattattagtctgctatttgtgggctttcatattttgtctcaaatccaaccttctctttactcactatttctaaacacattgtgcatttttcaatatatatgcatttcaatatctatcttttgcttcctctgcctgtaatacccttttctacgccctatctctcctgtgtctttagaaattctatcagttcttcaaatgaacctcaaatagacttcctccacaatccttcacctatcataccaggattgtttatgtttctgaaatttcacagcctatcttatacttttcctgtttacttgattcatgttggcttagtttaattacacacgaagaaatcttgtgttgcctgatggactgtaaactccttgaaaacagggtttgtgttcattttttttgtattctaaagtaacaaggaaagttctccaaacataaatgtaataggtatttgttgaatgaatatagaaggaagggtgtaggttttggataagaaatcatcattatcaaactagtcaaaaatgacaagagtattgttttggatgcataagtatagaattagtacctctcactcatcccccactaagacgtttttgtcgttagcttgctgctaactgggctctggctgttacctcgcaaagactctgaagtaggaaagagcttggcacatttagaaactcacagatcatcaatgctgtagtgaggtgaaggagggagaaagtaccatgggttgaagttagagagttggagagagataggataggtcactagaactttcaggccaagttatgcagtttagggttttttttttttttgttttgtttttaaacaatggaaagcctttgaagggttttaagctggggaataaaaagataatactttacttttaaaattgcacccaggatggatggaagacagagagtgggaagatgagtgaaagcagagaaaacagttgggcactcttgtaggtgagagactgcatggccggggctcaactggcaacagtggagatggagagaggtgggtggaattgagatttattttgaaagtagaatggacaggatttgctgaagaaatgttagggaaaagaaagaaagcaatttgatatgatgtctcagtttctcactcaaacatctacgtggatgttgtggccatatttcttatttaacttatggatgaaagaaggtttcatatagcagataatttccaacaattcttaggcatcaatttacctgacaatagaaaactctgatgccatttgggatagaatgaattgttcctatatgacttccagagactgagtcattgtgggtgcttgtcatgcagtactcactgaggtgtaggaggatagcttcatggagaagatatatcttgaggtggatctagaatgaatatcaagctaaatttaaaattattaaggatggaatgaagtttatattcattatccacagtccatttgtatcaattttctgggatgtctattatcctgtaaaaaacatgtatttccgcagttataagagctttgatattggtgtgaaaacaatggtccctaattaagccataaggtattttgggaatttaaacaaatgtttggtggttatcaactgggaacttctggagaggtgaaatattgtatcggggacgcattgttctttttaaaggccacacggtgttctacttatatgtcatatcatgtacatagccagttccttcctggtggacatttaggttgtctcaaccttttcctatctccaacagtgcatgcttgtgcaagtatatccgtaggacaaaatcttaaggatagaattattagataaaagcagttaccaaatttaccaatcttcctttccagaagattgtctgggaatgactgcttttcttaccaccctaccaacacaggtgctaatctcataggaaaaaaaatgctactttgttttaattttaattcatgtttcttttgtcaggagtacaatcaagcaccttcctcctattaatatgtttatttcctcttctcacttttaaccattcttcaacctctacaattatgagaaagtaatgactgtcaaaaaaaaaattgctcattttttctgacatctttcaaggccctgaatagacgtcctaatttccaggtctgtgtagactgacttgggttactcaggtaatggcctctcttctgttgatgaacacacgtattgaagcatatatatgccaggctcagtactagacacaaggggtacagtcaatgaacaaaatacacacaatattctaccctcatagagcttacattttaaagggggaagcatacaaaaaataaattagctaaaaatataaatatcaagtggtaatagtaccacacagaagaataaagcagagtaagggtttagatggtgaagataggagagctgctcttttacatgaggttaacaggaaaggcatttccaagtacttctccctgcttctttctcatctgtgtgctctagttttactctccctcccttgtttgatccctattattacttgcaagtgtaaattccctaatgcagaacatggttagcatttggttaatggctttcccgtaataattgcattaaaatgatttctctccactatgaattatctgacatgtcagaacagacgaatgctatctaaaggctttttaaaatctgttaaatttatagggcatattccagccctcaccaagggtcacttcactccattctcagatagtgcccactgtcctgcatttgcctgctgtcaatcacaaaagagatggcttcttaatgaggctggtttatgacttttttccttaagacaaagtcagtcttcttttgcaaaagttgttctaatgaaggaaagtagaaataaaaattcatcatagcttctatggccagacataaaatgtctacagcaggattgatatggaaacataagcttttattaatttgtttatctggatgcttctgaagctagaaagaaagactttcaccatggaagcactggcaactgaatttccataatggattcaaagatctaaagaatatcctcaatttacatattctttctgaatttatgttcaaagaaagggtattaatataaacataaagtaaaataagacaaagcccaagtgtattaagactattcaaggcctgccatgcaaattgcagtggaaaagtctaccagtaggttattgggaaacagagagaaacttggagtccaaagataggagaggatacccaccactaactttcaatgaaaccacaagctggccacttagcttttcttgtgctgtagagtcaaatgtgaaacaataggctttatttatttaatactttgtataaggcactttgctcagtacattatatattgtctcatcctcatagtgagcctgaagggtagtaatttcattgtaccttacagatgaataaacttagacttagagaccggtcaaatagcctgcccaaaacaaccagttaataaatggaattgggatttaaacttagatttgtctgattccaaagcttgtgcccaaccagtgtttattgagtaccttccaaagagccaagcaacagtttgaaataggttcacatatgttcaactatcacaacaaccagatagagtagatattctgttgaagatgaggaaatgatgtgggggagaaaaagtgattgtgtgggggagaaaaagtgattgtgttgaggtcacacatctagagtggtcgagtcagaatatgtgtgaactcaagacctctagctccaaacctatgaattttgtttttaaaacatgactatagtctattctctgtacaatgttcataatattttttctgccagttgcctgctccctttaggtaaagggataattagcagagattccttgcagaaaagtgtcaaatatcagcacttaaaaacagtgctgaattttcccgttatttagcccattacttcattgagcctaatttcatgcttctaaaaacagcataagttctgtgggtagtgttcagtatgcttcagtgaaccgaatgcatcctagtggcctgagaagactcctactgcttctaaacatgtatgaataatggttgccacctgcaagtagcttaggcagtgggcaatcatacttcaattctaaagggtgtggaagggatgagtattttctgtttgaagctcaagctagattaaatgaattcttgatcttaatctactttgaactctacttggaacacatcatgagttgttttggcttactattaatttttaaatacaaatacagtgctcttgtattgaaagcataggattttgtgtaggagaaaatttgaatgtcttgaaaacattcaaaggagagctcagggaaataaatgaaagctggtggatttctaaaaatctttattgaggattaatattagaaacttgctgtacagtctaactgatttttgactttgtttctgggctattggtttcatataagacactattagtaatttcagaacaaataatatggccacatttcttgttcctaataaattggtactacttgggatcaatggatgattgttgtcattccccaaaagattttttaacagcagaaccagaaaactaattcacaaattatcaatattcagcactttgataaattcagatgaatttgcctacctaaagaaatgctacctgaaaagcttctctggcaggcttctccagagtttcattatctactctgaacttttgtttacatagcaatcatttctgctgtgttccttttccctactagccttggtaggcttcttagctgaattgtcctgaaacctataaaccagccctggaggctctgaaaaattaaagatctgtcttttttgttctgtttaataaatgttagcttaagaaagtctgcaatggaagaacactcaacttgtcctaaatgattctctcatttattcaagttgcaaatagaaagaggtatttcccaatttgcaataaaatattggactttaatttctaaaaaaaaatcttgaaagctacatactccatagacttctaagcaaagagagtcaagagacattcatcttcttgaatcttcattaatcttcacgtcctaaataattctctcatttattcaagttgcaaatagaaagaggtattccccaattagaaataaaatattgggcttcagtttcaaaaaaaaatcttgaaagctacatgctccatagacttctaagcaaagagagtcaagagacaatcatcttcataactaacaccaattgtcataaagcttccaaatgtaaacctaaactttttgttaggagtaaaaataaaaaagccaaacaaatgaaaagctgtgaactttctaaaacatcttaaagattctctggaaatttaaacatttaagttatatgttaagttgtgtctatcaagcaggtactttagaaaaagggaagatttaaacaatttaaatatatgctctagttgtttgatttaaaatgctttttgtgccaaagaaattcaggatagagatttagtaatcagagttgaaaaatgcataacacattgttctagtaattcccatcattcaaaaggaaccatctgtactgaatattcttagatagtttttcaagttcggttttacattgcagacataaaggaactacttttgtatctcttagacaacaattctgttatagaagtttacaggctaatggcaaacacatctcataattgtccttccagtttcttgacccatgtttacttccctttaatttcatgccataagtcagtgctcttgacaaagtatactctgaacatatttataaatcattattttttccaagcagttaatctctaactccctttttcatttctgtatctccatcagcattttctttgcagggttcaatactcttaatttgacatacagacccatccctgagagcaagggagagagaggaaagccctggcctttctttttgtaccttgattttttccattcaaactcatcattgttggtgcattgaaatctggaggtttgagtgagagatggaatcagagagatttaggaatggattcagattctacaactaaaaaccattaggatgcctatgagctttgttttctgcataatatctgaattacaaattgtatttaacaagtaaaactaagttgtgtccgactaattgaaaaccactttggttaatgttacctctttttgtgtccatttaaatccattaaatctttcttacttttgcctttaaaattagagtaatctatacaattcatgctactgactctgccttttaaaacacacaaatattaaaaaaaaaagagacatgttctggtgtcttcccctcagcccagtgagatgtgttacacagtagtctttgttatcagcctttggtttctgataatttagaaagctttcaatccccatcacttatgaaagtctgtgaacaataatttttatttaaagatttcttacagtgccgaatcttacaaccatttataaattcatgtcatgttttcttaaagttacagaactcttttcaatttttaagccttaacctcttgtctgcatagcaaatcctatttattttttaaaaagctgaattcaagtgtcatctcttaaatgaagattcctgatcatgtcaatcaaagagagctttctcctctgaaatcttttttttttaaatattagtttcaggggcacatgtttaagtttgctctaatagataaatggtgtgttttgggggtttggtgtacatattatttcgtcacccaggtaatgagcatagtacccaatatgtagtcttctgatcatcaccttcctcctaccctccaccctcaaataggccccgctgtctgtccttctcttcgttgtgtccatgtaactcaatgtttagctcccaattataaatgagaacatgcagtatttggttttctgttcctgtgttagttctcttaggataatggcctccagccgcatacatgttgctgcaaaggacatgatctcattcttttttatggttgcatagtattccataatgtatatgtaccacattttctttattcagtctaatgttgttgaccattttggttgataccttgtctttgttattgtgaatagagctgcaatgaacatatgcatgtgtgtatcattatggtagaatgatttatattcctttgggtacatacccaataataggactgctgggtcaaatggtggttctgttttaagttcttcgagaaattgccaaactgctttccacagtggctggactaatttacattcccactagcagtgtataaatattcccttttctttgcagtatcaccaacaactgttactttttgacttcttaataatagccattctgactggtgtgagatgatatctcattgtggttttgatttgcatttccctaatgattagtgatgatgagtattttttcatatgcttgttggccgtgtaaatgtcttattttgaaaagtgtctttgcccactttttaatgggcttgtttgtttttttgcttgtcaatttgtctaagttccttatagattctggatattaaacctttgccagatgcacaatttgtaaatattttctcccatcctgtaggttgtctatttactttgttgatagtttcctttgctgtgcagaagctctttagtttaattaggtcccacttgtcaatttttgtttttgttgcaattgcttttggcatattcatcataaaatctttgccagggcctatgtttagaatggtatttcctaggttttcttcaatggtttttataattttacattttacatttaagtgtctaatccatcttgagttgatttttgtatatgatctaaggaagctgtccagtttcagtctttggcatatgattagccagttgtcccagaaccatttatcgaatagggagtcctttccccattgtttgtttttgtcaactttgttgaagatcagatggttgtaagtgtgtgggtttatatctgggctccctattctgttccagtggtctatgtatctatttttgtacctataccatgctgtcttggttactgtagcattgaagtatagtttgaagttaagtgatgtgattcctccagctttattcttttttgcttagaattgctttggccatttgggctctttttgggttgcatatgaattttagaatagttttttctagttctgtaaagaatatcattgttcatttgacaggaatagcattgcatatgtaaattgataaattcctgaaaacattcaacctctcgagactgaaccaggaagaaatttaaaccctgatcagaccaatagcaagttccaaaattgaatcagtaataaaaaggctaccagccagaaaaagccttggaccacacagattcacagcaaaattctaycagacatataaagtagagctggtaccattcctactgaaactattccaaaaaattgaggaggaggaactcttccctaactcattctatgaggccagcatcatcctggcaaagacaaagcaaagacataacaacaacgtaaaaacttcagaccaatatccttgatgaacatagatgcaaaaatccttaacaaaatactagcaaactgaatccagcagcacataaaaaaaactaatcccctctccctctccctctccctctccctctccttctccccacggtctccgtctccctctctttccacggtctccctctgatgccgagctgaagctggactgtactgctgccacctcggctcactgcaacctccctgcctgattctcctgcctcagcctgcgagtgcctgcgattgcaggcctgcgccgccacacctgacaggttttcgtatttttttggtggagacggggtttcgctgtgttggccgggctggtctccagctcctaacrgcgagtgatctgcccagcctcggcctcccgaggtgctgggattgcagatggagtctggttcactcagtgctcagtggtgcccaggctggagtgcagcggtgtgatctcggctcgctacaacctccacctcccagccgcctgccttggcctcccaaagtgtcgagattgcagcctctgcccggctgccaccccgtctgggaagtgaggagcgtctctgcctggccgcccatcgtctgggacgtgaggagcccctctgcctggctgcccactctggaaagtgaggagcgtctctgcccggccyccatcccatctaggaagtgaggagcgcctcttcccgacctccatcccatctaggaagtgaggagcgtctctgcccggccgcccatcgtctgagatgtggggagagcctctgccccgccgccccgtctgggatgtgaggagcgcctctacccggccgcgaacccgtctgggaggtgaggagcgtctctgcccggccgccccatctgagaagtgaggagaccctctgcctggcaaccgccccgtctgagaagtgaggagcccctccgcccggcagctgccccgtctgagaagtgaggagcccctccgcctggcagccaccccgtctgggaagtgaggagcgtctccgcccagcagccaccctgtctgggagggaggtgggggggtcagccccccgcccggccagccaccccatccgggagggaggggcgcctctgcccggccgcccctactgggaagtgaggagcccctctgcccggccaccaccccatctgggaggtgtacccaacagctcattgagaacgggccatgatgacaatggcggttttgtggaatagaaaggggggaaaggtggggaaaagattgagaaatcggatggttgctgtgtctgtgtagaaagaggtagacatgggagacttttcattttgttctgtactaagaaaaattcttctgccttgggatcctgttgatctgtgaccttacccccaaccctgtgctctctgaaacatgtgctgtgtccactcagggttaaatggattaagggcggtgcaagatgtgctttgttaaacagatgcttgaaggcggcatgctcgttaagagtcatcaccactccctaatctcaagtacccagggacgcaaacactgtggaaggccgcagggacctctgcctaggaaaaccagagacctttgttcacttgtttatctgctgaccttccctccattattgtcctatgaccctgccaaatccccctctgcgagaaacacccaagaatgatcaataaaaaaaaaaaaacaaacaaacaaaaaacaaaacacaaacaaaaaagaaaggtttgagctaagaacttgcaggagacaaggaaattagtcaagcagaaggatatctgggggaatggcatgcgaggcagaagggaaagctagggtcgaggccctcagggaaagaagcaaggccaaggggctggagtagagggaggaagaggggaagtagtggaagatgagactagctttactactgattatgatgtaagaatagtggccagtttcctttccaacttgggcccggcagaatggctcctgcaaagaagggtgatgagaagaagaagggtcattcgccatcaacgagatggtgacccgagaatatcccatcaacattcataagtgcattcatggagtgggcttcaagaagcgtgcccctcaggcactcaaagagctccggaaacttgccctgaaggagatgggaactccagatgcacactttgataccaggctcaacaaagctgtctgggccaaaggaataagcaacgtctcatactgtatccatgttcggttgtccagaaaatgtaatgaagataaagatttaccaaacaagctctatactttggttgcctacgtacctgttaccactttaaaaaaatctacagtcggtgtgaatgtgaactaactgctaatcatcaaatataccaaataaagttataaaattgtttaaaaaaaaaaacaaaaaaaaaaaaactaatccaccaccattgagcaggctttatccctaggatgcaagactgatttcaacatatgcaaatcaataaatgtgattcaccacatgaacggaataaaaacaaaaaacacatgatcatctcaatagatgcagaaaaggcttttgataaaattcagcaaccttcatgttaaaaaccttcaaaaaactaggcattgaaggacatacctcaaaatagtaagccatccacaacaaaacccacagccaacatcacactgaatgggcaaaagctgggagtattcctcttgagaactggaacaagacaaggatgcccactctcactgctcctatttaacatagtattggaagtcctagccagagcaataagggaagagaaagaaataagaggcatccaaataggaagagagaaaatcaaactacctctgtcaaactacctagaaaaccccatagttttgcccaaaagctcctagataacttcagcaaagtttctggatacaaaaatcagtagcatttctctacaccgataatgtccaagctgagtgccaaatcaagagcataatcctattcacaatagccacaaaaaataacatatctagaaatatagctaaccagtgaagtgaaagagctctccaatgagaattacaaaacactgctgaaagaaatcagagatgacataaacaaatggaaaaacattccatgctcatggataggaagaatctcctctgaaatcttatagctagagaaaccataacatttatcatacaaatttggcattttttgagggtgaatgaatgggagaactattagtagtcacattgggacaataatcataaactggaactatcctgtgtaaactggatgtattgtcacccaagttattgccttttgggatcctaactgttagtatcaaggactttggaccgaagtctgtctggttccaaattctggttctcagcatgactttgagtagattattatatcctttgccattcacttattctttttatagcttcttactaagcttgtattagatgtgtgcaaattgtaaggcattggtaacacaatggtaaataatatttatggtttgtgctgtcatgaagcttacatccaactttatctacaaagtggggccaaggatacctacattatgaaaattctttatatcatcgtgagaagtaaatactatttgtgaagcatttagtaggattttcagtatataggaagtcctcagtgataactataattttatttgtatttttcatatgccattttgttgcatagtcgcatgtataattgtaaggtttttgagagtaggaggcaaggcttatgaacatttacataccttcaggcatcagtatagtagcctctcattgcatgaatgaatttattgagtgaattccactaaacaccaggtatcaaactttttttttttctcattatctcttctgttttttgttcctctgttgtttctttcctgctcttttcagagcatttgaatattttttagtgtgccattttattttttctattggcttttagttatacccccttatctctctgtttatcatttatcttcctttttaatttaattttcttgattgctcaagggctaaaaatatgcagcccctatgcattagaatctattcatactcagtattgtacctctccacatttcacacttaacatttgacaaatgtagtaaacttacaacattttatttcaatttagtcatcctctttcttttattttctttttatttttttgagacagggtcttgctctcacccaggctggagtgcaatggcacaatcatggcttactgtagcctcaaactctggggctcaagcagtcctcctgcctcggcctcctgagtagctgggactcagtcatgtgccaccacacctagttaattttttatttttatttttagtagacatgaagtctcactatattgcccaggctggtctcaaactcctgggctcaaatgatcctccctgctctgcctcccaaagtgctgggatcacaggcatgagccacaacacctggcctcatctccctttctttgtatggttattgtcatattcattattttaacatgtcataaccccaaccttagagtgttttcacttttgccttaaatagtagtctttaaggaaattctaagaaagaaaacatactactttatatttagtaatttacttaacatttccagtgctctttttctttcttactgtagatctgaatttccatctggtatcagttatcttcaactttttgtatttcttatagtgtaggtctgctggtgattaattttctcagcttttatttatctgaaagtgcctttattttcttcccatttttgaagaatatttttgttggttgtagagttctgagttaacagctttgttttcgtttttcctttcagcgatttaaaaattccatgccattggggttttcagtccccactgtttctcataagcccatgatcattcttatccttgttcaactgtacgtaatgtgtgtctttcctctggatgcccttaatatttcctctttatcttggatgtgctgcagttttattacaatgtgcctgggtgtggttttctttatatttattcttcttggggtttgctaaacttcttggatctgtttgatcgttttgaaaagttttcagctgttattccttcaaatatttttttctggcccattctcactcgcttttctttctaggattccaattacatttacgttaagactatttggtattgtcctacctattcctgaatcttagttcatcttcctgattattttccccactcttcctttctaagattaaataatttctactgatctgttttaggttctcttttcttctgccatctctaatcagctattcagacctgtccactaaattgttcatttttatttttttttagttctagaattttcatttggttattttctctgcctagactcctctattcactccttgagatcatatttcctgtcattctttggacatatatatttaaaattctttaacatatttacaaaagctgctttagattctttgtttggacatatctgggtaattttgagatttgtttgtatttactgcttttttgcttgcctatgtatcatattttcatttttttaaattatgctttaagttctagggtacatgcgcacagcgtgcaggtttgttacatatgtatacatgtgccatgttggtttgcttcacccatcaactcatcatttacattaggtatctctcctaatgctatccatcccccaccccccacacccccccaacaggccctggtgtgtgatgttcgccaccctgtgtccaagtgttctcattgttcaattcccacctatgagtgagaacatgtggtatttggttttctgtcattgtgatagtttgctgagaatgatggtttccagcttcatccatgtccctgaaaaggacatgaactcatcctttttcatggctacatagtattccatggtatatatgtgccacattttcttaatccagcctatcaatgatggacatttgggttggttccaagtctttgctattgtgaatagtgccgcaatagacatacgtgtgcatgtctttatagtagaatgatttataatcctttgggtatatacccagtaatgggatggctgggtcaaatggtatttctagttccagatccttgaggaaacgccacactgtcttccacaatggttgaactaatttacactcccaccaagtgtaaaggcattcctatttctccacatcctctccagcatctgttgtttcctgactttttaataattgccattctaactggtgtgagatgatatctcattgtggttttgatttgcatttctctgatgaccagtgatgatgagcattttttcatgtgtctgttggctgcataaatgtcttcttttgagaagtgtctgttcatatccttcgcccactttttgatggggttgtttgtttttttcttgtaaacttgtttaagttctttgtagattctggatactagcactttatcagatgggtagattgcaaaaattttctcccattctgtaggttgcctgttcactctgatggtagtttcttttgccatgccgaagctctttagtttgattagatactatttgtctatgttggcttttgttgccattgctttttggtgttttagtcatgaagtccttgcccatgcctgtgtcctgaatggtattgcctaggttttcttctagggtttttatggttttatgtctaacatttaagtctttaatccatcttgaattaatttttgtataaggtgtaaggaagggatccagtttcagctttctacatatggctagccagttttcccagcaccatttattaaatagggaatcctttccccatttcttgtttttgtcaggtttgtcaaagaccagatggttgtagatgtgtggtgttatttctgaggcctctgttctatttcttggtctatatctctgttttggtaccagtaccatgctgttttggttactgtagccttgtagtatagtttgaagtcaggtagcgtgatgcttccagctttcttctgttggcttaggattgtcttggcaacgtgggctcttttttggttccatatgaactttaaagtagttttttccatttctgtgaagaaagtcatcggtggcttgatggggatggcattgaatctataaattaccttgggcagtgtggccgttttcacaatattgattcttcccatccataagcatggaacgttcttccatttgtttgtgtcctcttttatttcgttgagcaatggtttgtagttcttcttgaagaggtccttcacatcccttgtaagttggattcctaggtattttattctctttgtagcaattgtgaatgagagttcactcatgatttggctctctatttgtctgttatttgtatatcagaatgcttgtgatttttgcacattgattttgtatcctgagacttcgctgaagttgcttatcagcttaaggagattttgggctgagatgatggggttttctaaatatacaatcatgtcatctgcaaacagggacagtttgacttcctcttttgctaattgaattccctttatttctttctcttgcctgattgccccagccagaacttccaacactaagttgcataggagtggtgagagagggcatccttgtcttgtgctggttttcaaagggaatgcttctagtttttgcccattcagtatgatattggctgtgggtttgtcaaaaattgctcttactatttggagatacattccatcattatgtagtttattgagagtttttagcatgaagggctatcgaattttgttgaaggccttttctgcatctattgagataatcatgtggtttttgtcattggttctgttgacgtgatggattatgtttattgatttgagcatgttgaaccagccttgcatccctgggatgaagctgacttgattgtggcagataaactttttgatgtgctgctggtttcagtttgccagtattttattgaggattttctcatcgatgttcatcagggataatggtctaaaattctctttttttgttgtgtctctgccaggctttggtatcagaatgatgctcataaaatgagttagggaggattccctctttttcttttgattggaatagtttcagaaggaatgttaccagctcctctttgtacctctggtagaattcagctgtgaatccatcgggtcctggactttttttggttgataggctattaattattgcctcaatttcagagcctgttattgatctattcaggaattcaacttcttcctggtttattcttgggagggtgtatgtgtccaggaatttatccatttcttctagattttctagtttatttgtgtagaggtgtttatagtattctctgatggtagtttgtatttctgtggatcagtggtgatatcacctttatcattttttattgcatctatttgattcttctctcttttttattagtcttgctagcagtctatttttttgatcttttcaaaaaaccaacttctggattcattgattttttgaagggttttttgtgtgtctctatctccttcagttctcctctgatcttagttatttcttgtcttctgctagcttttgaatttgtttgctcttgcttctctagttcttttaattgtgatgttagggtgtcgattttagatctttcctgctttctcttgtgtgcatttagtgctataaatttccctctacacagtgctttaaatgtgtcccagagattctggtatgttgtgtctttgttctcgttggtttcaaagaacatctttatttctgccttcatttcattatgtacccagtagtcattcaggagtaggttgttcagtttccatttagttgagcagttttgagtgagtttcttaatcctgagttctaatttgattgcattgtggtctgagagacagttttttgtaatttctgttcttttacatttgctgagtagtgctttacttccaattatgtggtcaattttagaataagtgtgatgtggtgctgagaagaatgtatattctgtagatttggggtggagagttctgtagatgtctattaggcccgcttgttgcggagctgagttcaagtcctggatttccttgttaaccttctctctggttgatcggtctaatattgacaatggggtgttaaagtgtcccattattattatgtgggaatctaagtctctttttaggtctctaaggacttgctttatgaatctggatgctcctgtattgggtacatatatatttaggttagttagatcttcttgttgaattatctctttaccattatgtaatgcctttctttgtctcttctgatctttgttggcttaaagtctgttttgtcagagaccaggattgcaacccctgcttctttttgctttccatttgcttggtagatcttcttacatccctttattttgaacctatatgtttctctgcatgtgagatgggtctcctgaatacagcacactgatgagtcttgactctttatccaatttgccagtctgtgtcttttaattggagcatttagcccatttacatttaaggttaatattgttatgtgtgaatttgatcctgtcattatgatgttagctggttattttgcccattagttgatgcagtttcttcatggtgtcgatggtctttacaatttggcatgtttttgcagtggctggtaccagttgttcctttccatgtttagtgcttccctcaggagctcttttagggcaggccttgtggtgacaaaatctctcagcatttgcttgtctgtaaaggattttatttctccttcacttacaaagcttagtttggctggatatgaaattctgggttgaaaatttttttctttaagaatgtcgaatattggcccccactcttttctgtcttataaggtttctgccgagagagctgctgtttgtctgatgggcttccctttgtggacaacccgacctttctctctggctgcccttaacattttttccttcatttcaaccttggtgaatctgaaaattatgtgtcttggggttgctcttcttgaggagtatctttgtgatgttctctgtatttcctgaatttgaatgttggtctgccttgctagtttggggaagttcttgtggataatatcctccagagtgttttccaacttggttccattctccccgtcactttcaggtacatcaatcagacgtagatttggtcttttcacatagtcccatatttcttggaggctttgtttgtttctttttactcttttttctctaaacttgtcttcttgctttatttcattcatttgatcttcagtcagtgatatcctttcttcgacttgatctaacaggctattgaagcttgtgcatgcatcacgaagttctcgtgccatggttttcagctccatcaggtcatttaaagtcttctctacactgtttattctaatttgccattcgtccaacattttttaaagattttcagcttccttcaatgggttagaacatgcccctttagcttggagaagtttgttattaccatccttctgaagcctacttctgtcaacttgtcaaagtcattctccgtccagctttgttccatagctcgtgaggagctgtgatcctttggaagagaagaggcactctggtttttagaatttttaaattttctgcactggtttctctccatctttttggttttatcaacctttggtctttcatgttggtgacctacagatggggttttggtgtggatgtcctttttgttgatgttgatgctattcctttctgtttgttagttttcctcctaacagtcaggtccctcagctgcaggtctgttggattttgctggaggtccactccagatcctatttgcctgggtatcaccagtggaggctacagaacagcaaatattgctgcctgatccttcctccataagcttcgtgctagaggggcacctgcctgtgtgagatgtctgtcagcccctactgggaggtgtctcccagttaagctatgtgggggtcagggacccacttgaggaggcagtctgtccgttctcaaagctcaaacgccatgctgggagaaccactgctctcttcagagctgtcagacagggatgtttaagtctgcagaagcttctgctgcctttttttcagctatgccctgcccacagaggtggagtctatagaggcagtaggctttgctgagctgtggtgggctctgcccagttccagcttcctggccactttgtttacctacttaagcctcagcaatggtgaacacccctccccccaccaggctgctgcctcgcaggtcaatctcagattgctctgctagcaatgagcaagtctccatgggtgtgggacctgctaagccaggcacaggagagaatctcctggtctgctggttgctaagacagtgggaaaagcgcagtatttgggcgggagtgtcctgtttgtcatggcttccctttgctagaaaagggaaatcccccaaccccttgtacttcccaggtgaggcgatgccccaccctgcgctggctcccgctccatgggctgcacccactgtccaatcagtcccaatgagatgaaccaagtacctcagttggaaatgcagaaatcacccatcttctgcatcgatgacgctgggaggtgcagactggagttgttcctatttggccatcttggaatggagatcttatttctttatctggtgattttttattgcatactggacattttggacaatgtgttatcatgcctctggattgtgttattttcttctgaagaattttgcttgttatcttagcatgctgttcaattggctgatcacgttgaacatgtttaagcatggttttaggctttgttagtccaaatctttgagaaatcccaggtgctttcccaacctattcaacctggcagtattcagtgttgatagaggatgtttttcttgatgataggctttgttttagactttactggagtcataggacttactttaggacatagtctttacttgtagagaggtaccaactttctgtttctcaggtagatcccaggggtgtcaaagtagtatttatttatgagctctctcaaacccataggacctgaactgcaatgatgtctagtactattcttcttccagcattacttgacctccactatttctgttctctcaacctgataacattttctctctgttaagcctccagtattctcactctgcaaatgtatggtggtgatctcagtcacagatttgtcccatgtctgggacaaatctctgcaaaacttctgagacttctctgtgttaaagtctttactctctaagactctgctttatagatgccagccatgccagctgcctcagactccagctctttttgtcatgtttaggaaaatatccttattcacagaggtggacattcgtgggcagagggatttcagttctggattggcttgttagccactgtttgaaaacggtttcctcatatattttacttagttttgtaagtattttctgtgagacagataatctgttactagttactctatcatagctggaagcagaaatatataggtatcaatttgatttgcaattgtttctagtttacaatgcattctgcctatcttaaaaaatttgtaattctaatcattttatttttgatcagggaatgtatttattgattcacatgaataaaattcaaaggctatagaagaatatgtagcaaaaaatctctcttctaatctagtagcctaattcttctcctcagaggtgatagatattaccagttctttttgttccctttcagacatattttagatatatatgaaatcctctccctcttcttattttcctcacataaatgatagcatgatgtgcatactttatatttttttgtgttttgtcttttttctacttaatgacatatcttggaggctatacatattaatatataaagaatttctacattcttttttgggctacatgatactcagttttatgaaataccatgaattatctcaccagattcctatttttactcatactttttggttattataaacaatgcttcatgaactactttgggtaaaccatttggtatatgccagtatatctgtaggatacattcataaaagtgcaattgctacctgaaaatgtatgcacatttgttacttagttaaatgttgccaaatttccctccagcagctgtgttagtggctgtagcctcgttaaaaatgtatgggaggaatgctgacatttttgttttacctgcagtatccattttctccatggtacatctacaaaattggcttctattttttattcttatgtttatcttaatcttttaataatctttccctgattaacttacaagtttcttgttataacaaataagggggctaagggggagggggatggttaatgaggaaaaaatagaaagaatgaataagacctactatttgatagcacaacagggtgactagagttagtaacttatttctacaattaaaaataaccgagagtgtaactggattgtttgtaacacaagtgataaatgcttgagggaatggatactccattctctatgatgtgattatttcacattgcatgtctctgtgtaaacatctcatgtaccccataaatatattatacctactatgtacccagaacaattaaaaataaaaaaatttaaagtacaaaaaaagacaaaaagagtcacacagaaaataaaggaaaatagtctatagaaggataaaaaacaaaacaaaaaaacaaataagataagcagcagcgatttatataaattagagttattattattactgtggttgctgtggttgattttcctaatattccagggcacgaatcagctgataatatccattttaaaagtgcaattttatttccattttagtcagtctgattttcaaattattctcccctttttgtgctttaaaaataggggtataacatatgctagcctgttcccaatttgaactcgtgtctttcaaatgcacagtctaactttattaattctgtatggaatcatgtcctgtgagctttctagcttttctttctttcttgttttttttcctttacctcacttgctcttctgaatttgaggagctaaagatatttgtgacaagacttagctactcaatgaacattccgaatcaatgttttcctgtggaaacagtgactctgatggaatcttctccacttcctggaacattaaattgtcactaggtaattcaggagtctctttttcaggttcttgtctgcagtatactgaaaagtgaattgtgacctcattgttatgaaatttggaagtgtttatctttaatgttagcttagagtgtttttttttccctctctcttgcattccctttaaaccctgaccatttaaacattatagacaaggacatttctcatgtgtttgtctttctctaaatctgttagtactttaaactgtgtggtcccaacacgatgttgtactatacttgtggaatcaacactcaaaagagcccattcagaagagttttttttcttcttcttggtaactgctttctaaaaaaaattcttctttatattctaaagctctaagcccccaagccccatcctcccatgttgagattcctgttgccacctgcctttgactcttctatgtcctcctgtcaaatacccttcctggcctattgttccaacttattataaaacactgtaactgaatggcttgaaaagatgttgcgaatgtagttgatttttcctctgagaaacaagtgtgttagcttctttggagaatgtattaactggtactactggcactactaagctctaggcttagaactgtgtgagggaaacaaaaaacagaacaaagatatgcagaagtctggtttttgccctccaggagtgcaatggttgtgagtgtaggatctgaactcaagcagacagatgtaggctggatgatcttgggtgaggtacactaaatctcagttctctcatccgtgatacaattgtactcatctcacagattaaacaagataaatctgtggggagaatccgccccagaattgagagaggctgttctctgggcacacttgctttatgtggtcttttcaattgctgtcaatcagtttttaaaatctggttgcccaaacaccattgtggctattaccatgactacttcatgttctggctgttctggcagtacaaatgagtctggacatctacttcaggtaaattggatgtttgattaattaataaccatgtaggccatttgtagatggaatcgcacagtgtgattagtcatggtagcatgaagactttaacaggccaatccctacatctcaatggctttatatattacatatttatttcttgttcgtatcacattacaatgtggattgggggtaaagtgggacacagcatgttccacaaagttattcagattcccaagctgtttttacctagttcattatcctctaaagccccagagtcttggatattaatttctctgaaggaagagtgtatgatagtgtgtccagaattggtgggctcttggtctcactgacttcaagaatgaagccgcggacgctcatggtgagtgttacagttcttaaaggcagtgtgtccagagtttgttccttctgatgttcggatgtgttcggagtttcctccttctggtgggttcgtggtcttgctggctcaggagtgaagctgcagaccttcgcggtgagtgttacagctcttaagtcagggtgtctggagttgttcgttcctcccagtgggtttgtggtctcgctggcttccggagtgaagctgcagacctttgcagtgagtgttacagctcataaagacagtgtggacccaaagagtgagcagcagcaagatttattgcaaagagtgaaaaaacaaagcttctacagtgtggaaggggaccccagcaggttgccactggtggctcaggcagcctgcttttattctcttatctggccccacccacatcctgctgattggtccattttacagagagctgattggtctgttttacagagagctgattggtctgttttgacagtgtgctgattggtgcatttacaatccttgagctagacacaaaagttctccatgtccacactagattagctagatacagagtgtcgattggtgtatttacaaaccctgagctagacacagagtgctgattggtgcatttacaaaccttgggctagatacagagtgctgattggtgcattcacaaaccctgagatagacacagggtgctgattggtgtgtttacaaaccttgagctacatacagagtgctgattggtgcatttacaatcccttagctagacataaagattctccaagtccccaccagactcaggagcccagatggcttcacccagtgggtcccgcaccgggcggcaggtggagattcctgccagtcccgcgccctacgcctgcactcctcagccctttggcagtggatgggactgggcgccctggagcagggggcagcgcttgtcagggaggctcgggctgcacaggagcccatggtgggggtgtggggagactcaggcgtggccgcactgcaggtcccgagccctgccccgtggggaggcaactaaggcctggtgagaaattgagtgcagcagctgctggcccaggtgctaagcccctcactgcccggggtggcggggccggcctgccgctcccagtgcgggcccaccaagcccacgcccaccggaactcgcactggccttcaagtgcctgccgcgcagccccggttcccgcctgcacctctccctccacacctccccgcaagctgagggcgccggctccggccttggccagccgagaaaggggctcccacagtgcaggggagggctgaagggctcctcaagcacggccagagtgggcgccaaggccaaggaggcgctgagagccagcaagggctgtgagggctgtcagcatgctgtcacctcttaataggtggtttggaggttttaggaaccaggtctggatggggtacatatgacttacattcacattctattggctagaacttgtctcatagcctgatcagatgcagagggtctaggaaataggtgctgaaagaagggaacccatgcacattaatgagtaccattgattgctccctttcagtggcactttaaaggtttggacttccagttgtctcacccaggttgagtgcaaccacttaggcattcctaccatgtgacaaggtactggcatctagcttgatgtgggtctgcccaatggcaaatgattaccctaagactcaaatttcatttcccttcttcctgtgtcttaaccaaggagagattttaaaacgtataccagagacgaagaggcactttgaatttgtccgggtaggtgcttcttggtttggggatgttatgaccttagataggtaagtgaaggctgtcatgtggaatgactcccagatttaatgtaattccattacaagtaggtttacataagaggcacaactttgtttcttggttattccttattaccatatttataacacttaaaagaaagagttcagaaaatagctaggattggtttactccagatacctggagtgttaaccagcaaactgctttgtagccttgtgtgtaccaacagaagtaggttgcatattctgtcttttctttctccttgaaagcaatactttgctgatctttaacttatatatgtcccttggaatgatgccagggagaatttttataataggtccaaattatagttgcctgtctttgtgtgtgtatgtatatttaactttttaatttgattttatttttaagtagctttatctctggatgggcaatgcatatcttaatagtgtgatcaaaaacagttaagataaaaaatcttaatagagttttatgacccataaaaatactcaataatatcaatttttgtttttatgactattatttgcattctctagggaggcagattaacacataaaaactacctaaagaatataaaaacaatgtatggataatatggcagaaatggtatataattggtataaagtacaaaaccaaggactgctagtgcacagaagctttggtttgtttatttgaggagattcgtcttagcatcggccctactgtgtatgacagacaaggactgttatcacagcatgtactaaggaatacatgaccccttctgcttaccttcgaaaggggagaaattgtatctgtcgagaaacttggtggaacaaacagaagtgcatgcaattaattgtaagacatagggcatcggttctgttttctattttagaactgtaaaaagtttgacaaagtgaacctgaactctgataaagcagcaagaaaaatctggaagtgttctttgggttaggagatgcttataactggttggatggaaatagtagttacattaagattatttgttactttgggatctgatgcagggctgaaacaacccaatgtaagtcaatgatactttcaccagattgaagtttctaagctgtttttccaaaaaaaaaaaaaaataaacgaaaaaagaaattcaaaattaaaacaaaccactcccaaattctcttacatccatggcattctgaatttataaggataggctttggcccttttagaatctggttttatgaaggtggaaggaatgacaaggcttagtgcaaaatattaaaagtaccttatgcccttttaccaagtgtgcaccactgcgttcctgagtctgtgtagtcttcccatctatttctcctttcgtttcttcctccttctccttcctccttcctcctctcatcttcagaaaatgaaaggctctggaagtctattgtgtgtgagtacctttgggaccaatgtaaaacatagagcaatatgcatgcaagggatgcttctccttcagattggaaaaaaagtggatttaaatgaaaacagacctgacaatatacctttttctgcctataggtttgatgaggtaatgttataaagtatattgctctctaaaaatcctgagggtttttgagtgaatgatgtaatgaaagtaagctacagtagtcagtaggaatataatctaggaagtatgtcctgggataaataaaactgttgatagcatgaacgttatgtgcttgtgagctcagctagtgaggggatgaaggagcttgcatttattaaatagcttagttaaatgaattatacatatattccatgacttcaactatataatgttgtagttaaagtcatcattttagaatcagactgaagtggatctaaatcctggtattatgacttaatattcacctagtcattagcaaatgactccacctctagcctagccttagtttccttatctataaaaagtatttgattaaaacctaccttaaggatttgttgtaagggttataggaaataatgctataggctttggcaaataaaaaacaatcagctggctgttattaccttacagtggttacatatttttaaataaccaaaataattgacataaaattaacagaaaaacttaacaaaatgatttagtaaataacttaagatcttggagtgcctcatagtcatcattggaaacataaggagtattgtacttttctagaaccaataacataattctgggtgatggaatccttttgctataagtatctatgtgaatacacaaaacatgcagggtttgaactaagcatcgaagaacgaggatgatttgagaaaaagttctgtctccttgggaataatacaaatcagtgatccagacatgcagaaaaaagacaaaaacaaggtggaatgtggtagaatactacactaaattatttgagactgcccaaatacctccagatggagtaaggctctctaaaaagatattgactggtttttctatctcttctggattgctctttcaagtgaatgtgtaaatatgtctataaaaacgatgcagtgttgggtaacggcaacaaaattattggtctcagtctcccttggctgttttttcccctaatttctttgtgttttagttgatctacttgcaagatggaatagtggagataacattttcctagtgttcttttgaagacacgtataattgtagtcctattgtcctgagactgaatgtacagatgaacccagccatgaatggagaaaacctcaagaaaagtgaaagaaacaaaaacaagccaacagctccttcactgggataaaaaccctcagctaaaaagagatagttactctaagaattgtactgttttattaagttagtgacttaaaatattaatctttttgaatataatttggcatggggaatctttgggaagataaagattgtggtcaatataacacctatctagccaccttttttgcgggtggttgggtcagtagcagtggaacaaactagtatgtaaattgagatttctaggaaaggtggaaaatatctggggaacaccattggatcatagcttagttattgcagcaataagaaaaatatatttctaactttagggttaatttcactcacgttttccttcatttagatctggtttttaatccctgatttagagccgatcttttaaattgtcattttacttttttagagctaaatggtttgaattggacttaaatattcggaaataatgttaaaatgtgaaattcgttgcttttagtataaaataaatgtatgcattgaaaaattctttttacatggtgattactttcatatattgtgatgccttggttttatataataattgcaatgatgatgatgatgataatgagattagctaacacttatgtgatacttccctttgtgacatgtctgaatttcttctggttatgtcatacagtggtggtaataatacacgtgaaaggccaggatagttctagcccttacataagtttgctttatacttaagctagtcttttagtccgtttttcctttaaacatcataacctattttggttatagctaccagttgtaactattttcacatagatttttacagttaatggaaaatgaacccttctggaagttatcctttttatcagcaatgaagattataccagtgcatgctttattacaacctagaatgagtgtgacttgaaaaaattagaacttaccaagttgcttgactccctctttgtccagtgcagcagttaatatctcatctcccattctctagggccagtcagcctatgttcaaatgtcagttcttccatgtattagctgcaaaactgacctggggaaaagtatgcagcttttttagttcactattctcatacgtaaaatggggtaatggtacctacttcatatgattattgagaagtttaaatgaattcctgttagaagcagtaagaacagtgtctctcccatggcaagtgccttatgtttttaaaataaatataaatgtctgaggctcattgccatcatattatcacagagcctgtatcaaggacatggaggcaatacctgcagtggccaagcatgaaaatctttgacagttctgttacttgacagctgtaagagctttggaaagttgcttaaccttagactagctctcctcattgtaaaatggaagtcagtcatagtgtctgctttgtgtggttgctgaggattaaatgagatgatatttgtcaagacttgtggtgagtcacaaagttcactgacatctcatccagatgggcggagaagaggtagcttcttagttttgattttaactaatgtgatcttcctcctgagcaaaccactgctgattagaaggaaaaataaattaaatgtctaagctgtcttagtctgatgtattgattttagataatgctctgtctctaggaaaaggtgctcagactttcagatctctgtgttccaggattttccaggtttctctccaagatgatgtctggtatgtaggggaggggaggggcttaggcagcctcttggtgggagagaaaagtctggacccataggcatagtcatggtgtccactgatcgcacttcaggaacagagaccaatgcctctggatggactctccacacccagcctttgctagggtgccatcacattatttgccaggcttgtgttctagctctcagctagtcactttctaatttcccccttaaacacctggactcccagccctacctcaaaggttgccatagggaacaaagagctgctcagaaaagctaaacatcgaggcctccctctgcctaactccctccaaatgtccttggtatggggcagcctgagagggcatatctttctagagccctgaacaggaatggggcagaaatccttcatccctcgggctctcctctatccacacaagagtctttaaggcacacacatctgactgctttgttccttccctgcttttccttctcacactcctgggatgagaaagagagatgacagtttcctctacactcttctaggccaaatcttcatttcaccatggaagaactctttgagccaaatcatttggatatgtgaaaagcaatacagacatttaaacattcttcctcaagacaatatgtcagtaagacttggcaaatggcctgttttgaatgccagatgctgaatattaactccttcttcctttatctgtcttaagaatgttttataaatttgaaaagcaaggaagagcacagtgatgttttccaaaatattaatccaaagtaagcgcataatcaatacaagctttataatgatgatgatgatgatgatgataaagtaaccattagcacaggataattgctatatagattgtttttacccttggatagcttctggttttagggaagagaccataacttcagagcacttgtgcacttggcatcatgacacgtaattgctccgcctctcacaattctcaccccctctgccccctccccatctctctggccacacaagactttctgctcctggaacatgaaatgatttttcctgctttggggtatgtaataattactactctgtcacctgaagccctgtttcccatatcttttcttaactgacttctcattttcagtccctgccttaaaagctgccacctcgattttcctggatcttttctggccaccctaaccyaagtagccatccccacttccagttactctccataccacatcctcctttttcttttcttttctgcataagtcactattttatgtttacacatttttttgtctttctactccactagaatgtaagcctcaagaggacaggggctgtgtccgctttattccccactgggctggcagaggacctggcacaaaaaagagctcaatacatagttattgaatacatgataagtgactgaatgctatcttatttcagataaaaagaatcattatgattattaacattggtgacatggatgtgcatggagcaaaagtaccttgcataagcacagaaataaggattttctatattatatttattatgaaccatagtaatggcgagaatatctctctccctttattattttgttctatagtgatggtggtggtagagtgggctagcactgcctcttaaaaatgataagaagtcctttgaaggaagacatcatgctcgtatttctttcacactttttttgatatttagctgctcaatacaaacatgttggtgatcattggtggagggagtggggagtgggtgagggaaaattacaggccctccatttgcatatgattaaactggcaagactttccaggcaaagcagtgcttcagaaattatgtgattgacagaaggaaggtcacatatgtactttctagaagaagagtaattgtcaagttgtgtgctgaggagcctcagagcctcagttggcaatggcttatgtggaaattttcatttgaacagagagttttagggccacacccaagtggaaactacttatttcaggattggagcctccacagagaaagatcagaggtgggaatgaaacaagaaatagttccagagactgctgctgtgtaacaaattatcttagaacttagcagctgagaacaaccattttttttatgctcacgcaggaagctacaggtcaagaagtcagtgaaggcacagcgggaataggttgtctctgctccagctgtgcagacttgaagggcaggggagaccggatgccaggatggggtcacataaagacaccttccctcacatgtctggtgatcaggatggctccgtgtggcttagtgtccttacagcctggtggttgcatgttgtcagacactgggtgtggagctcaggactccaagcatacgagttccagtaaagaagacggaagctacactgcttttcatgtccaaccttggaaatcacacggcctcacttccactgtcttctcttggttgcaatagtcacaaaacccaccgagttcaagggagatgacatagaccgcccttctaaatgggaggagggtctaagaattttgcagccatgttttaaactaatattaggttggtgcaaaagtaattgcggttttygccattaaaagtaatataaggggccaagcgtggtggctcacgcctgtaatctcagcactttgggaggctgaggtggatggatcacctgaggtcaggagtttatgaccagcctggccaatgtggtgaaaccccatctctactaaaaatacaaaaattagctgggtgtggtgccgtgcgcctgcagtcccagctactcagaggccgaggcaggagaatcgcttgaacctgggaggcgaaggttgcagtgagccgagatcgtgccactgcactccagcctgggtgacagagtgagactccgtctcaaaaaaaaaaaaaaaaaaaaaaaaaaaggaaaaagaaaaaatgtaatacaaatgtaaggatgaaagaagcaagcagaggggaagagaggggtcttgtattctggaaagggagataggcttgtgactgcgcggatccaggttacatttactgcacatgtgccctgctttttttgcagctagagtgttttgatgatcttctgagagaaacgtctccttcctcagctccagtgtgctcgggagctaagagctgcagaaaatcatttgaaatctttggtggtcataataaaataggtaaaggtactctcaggtactcaacgaccctcttgtcaccaagcagctcctcatcagaacttctccaaacatacactctctcctttccacctccagctcatcttgcttggcctccgctttttccgtcacatctcatctcctggcctttttcattcctcatccctaccttatttccaatttcagtcacatttcggtgaacacactgctcttggtgcttacagcaaggaaggctagttgtgttgaatttatagtactttttcaaccagccattgggaagcacatggaactccccacactcatttttactgccatttttttttcaacataatttacaagaaatagaaggaatgtgtattagctaattgtgccacgtggtcctattttctcagcaatacttatttttattaatgcagctgatagaaaatgaggcaaattttcatcaaaaagcttgctaatgtaaaactgagagtaccaggcagcctggaataaaataaagaaacacaattgtaatattactattttgggagttttacattaaactcctacacaataatcaaaggtggaagtgtgatcataaattttagctggaatttaggaatgtggcagcaactctggggcacatttacaggaaaatcatagactcaaatggaatttgctgaggactatatatcaatttgccatcagagtagacagtattagaaaccctggactcttcccattaatcattgtagatgtggcatctcaaacagaagagagttatggcggttataaatcgtgcactgagagttgttttttactttagatagagaaaacagttgaaagagtttgggatagcagatgtattgtctctggttcctccttttagttttaaaaattaattgtgcatttcagaatcctgtactttaaatatttagacatggcaagttttaaaaagaagatatgtagggcacatacttctcatccactgctgacaggcatcaggaatggggtaaatttggataggagatgcttatccattctatgtcactgcagatatgaaattttgtcttattgttgttttgatttagcamgaaatatctttattattttttttccaatgatgagaatggaaatgttgtaattagttaagtctgaaactatgatttaggaaagaaaaaaaaaagtgcaagatgatctattgcacagagagccacccagagcccatctgttggatagaataaggaacccctgtgggtgtaattggggcaggaagaaggggcaggatatggtggaaagtgcttgggttttgaagcccaacttgtttttgagtccacgttctatgtttttcctttgtgttcttgagcaagatacttaacttcaataatctatgatctatacattgggaataataatcactatctagaaatggtgttttagagattaacatattataataaccttggtaaagtatctggcttatactcagtagaagtatctgctttatacccagcaaatattccttttcaaatagatgtaggccactatgttataattaataaagcaataccataagcatttgaatgtttctgcacaatgacctatttgctgtcttttgttaaattttcttagttgggggagtgaaactcctgactagctttgggctggatatagcatagcggtgcccacctatgtggaawggtttgaagagtcctcgacagggccagtgacctcattgtccttcatagagccaaaaattgcgccagttacagattcagtcccctgagttttgaacaaacttccaaaatgccagatcttctattataatgcaagtattcttggtagttgagaatggaggagagttatgagagtgaggtgaaataggttaagctacaggttgcaaactcattccttgctcctcttgggaaaactggacagtcagatgacacattattgcctggctgcaattggctgcaaggggcagctgcccagttttgatgggatgcccactcctgataggatactgatccctttcaccttactcttggcattctttagacattttcactgttttcctggcccttgcaacacctgaaaacttatttgcccacagttaattagagaagagaactgacagatgtcagccaaatttagttgaaagcgggtagtctgtatgtcagaaggctctattgttctttcattatatgaggtagggcaggtggctgcatctttgaactctagtttcctcctctgtgagaagatggcttagaggttccacaatctctctactttttctcattctctggttcctgatggtgatctgggttctacctgaagggagcccaggattagagaaaggaagaatattacaggcaaactggtctctttccaacatggcccaatccctcttggcggaatctgcttcagggaagttaagcgtttgtctagaaattatgatgtcatgttacggagcccttattccctcctctataaaacaactttcctgttgtcaattcttctgtaactatgttatctactatgctgaccacagggtacatgtggctttccacattaatgaaaataaaagaaaataaaatatcctgttcctgggccacacaatctcatttccagggctcaatagccacatgtggctagtagctacttggcagaggagacacagaaagaacattttcatcatcacagaaattctactcttgtagagagtgctgctctagaagctttaggccactgaagttgtattcagcgacctgacatcagagagtttttgtagtcacttgagcagaggtaatgcaatccctggggaagacttccagtttcaattacattcaggttaacaaagcccattgttccaaccaaaataatagttgctcaacattccattctgatgattttttttatccaagcagtcaacatagtttcattaaataccacccactaattgtgtactagttaaatgaggaatgaatgtggctctgtctccagataaatgaatagagagagagacaaaaaaaaaaaaaaaaaaagaattggctgactcggggtgctgggtacacaaaataacttggttaggctgtaggatcagaaaatctctctagatcttttttctagaacttcctttttcctagatcttcctttctgaggagaatcgctcagttttaacaaagtggccagtttacactaaaatgcttgtcatttatataaaatattggcatttgttgcaatattgcaaaccaaagagtcattgagttccaaactaaacaaaagttttatgaaacagtttgtcctgtccaaccttaaaaagagaaggcatttactatatgccaagcattgtgctgcctgcttcacgtgcattttctaatgtgggtttcacaatactttcttgacaaaggtcagctgtgcacctacctgctggagagacagcatcaggaaggagggaaagcagaggttgtggagtacagcagactgggcttaaatttcagctgtgttacttactaaacttcaagactttgggcatttacttaacttctattagctctagtttccctgtctgtaaaatgggggacatgatacctgcttcatgtgattgttgtgatgattaagtcagacaaggcaaaggaagtgcttggtgcaagacctggcacacagaacatgaatacaggggaagaggtcatcttttctgtccctactgaattgtaccttgtatatattggacactcagcaagtatttgttgaatagataggtggatggaagggtggaagtcacatctacaaaacattcttcatctgcagaacatttcctgrgagtgtaggtggttgcctaagtacaatgatttggggaggccaaaagtctcttattcaacctcaaacatcatcccactggctctggctgctattttgaaatttaagtattcttcattctattcagttatatgtccctgttaaaagcaaatattactttagagaaggaacacactaagctattgtgtgccatggttttggtccacctgccgagcctcctaagacagcactgtggagtggaaacacctctgatctgggagctggatattctggcctccagacctggctgtgctagcatctggcctttcctgggccttgacctcagatttcctartaattaaatggaggattagactagatcttctgtaaatggtttggtttctggttttataagtgggttaccaggcaagtgagttttcatgttgaggcatggggcaatgcctgggttggatggctttggaaggtggcaatgtggggattatagccctgcaaggacagggagcttctgtccaatgtggttacagggtgcctgataataasagcataagggacataccatgaaggaacaggggatcaacaatgacagttttaggactgtttcacagctttgttagataccaacctggtttataaacatcccttaggagtcttcctggatattaagcatcaacataagatcacctggaatgaagccagttgactgctccaaacgtgatcttcaaaactgggtgcccttatgcagcaaggcttgtgtgtattgtggaaaactgctccaggacattctgaagcgtgactgtccactcggtggtgcaaccacggactgccagaagctactggcctggagcaactggcctagcccatagaaagcaggaatgaagcagctcttcgtggctgtaggtgtcccacggaacaagggtagagccaattactgaacacctcccacatgccaggcaccatagtgggcatttcacacacattgtctcatgtaaactcacagctgttccatgtagtagacattactgccttcacaacacaaatggggaactgcaactcagagaggaaagaagtagaggtgagatttgagaagatttttggatgccaaaattcgcatgtcttcccatgtatgtcgcacaacctccaggatgttctgcagatatcacttgctgttatagttcaatgttctctacccatgggcatttagggtggaattattgttctcacattattgctatttcaggcattgctggaacaaagaaacaatcaccaccagtggccccatctactctgagagagagcgtttgaagtcatcagtcgtattttccagctgtcagggttccaatttaagttttatgttggatctttttctctttactcttggttgattggagttataatctgtgttttcmttcccatttttgggtattcacatttagattttattgagattcatttcatagtgctttaaaaggttaacaagaagcctgaaactctctgggtttcttattaagatgcagcagggaagaagacagagtgtttcagtttattgggctagacatatctgttgattgacgcagatgctgcaaacatgttctgggaaccatttcaatgttctgtaataagtagcacattaatcaggactgggcaaactggaggggtctcagcagggttggagtttcctgggaagtgcctattaagatgaagaattagccagtgctcacgtttaacaygtagactcctgagatgcggcctggagggagatgccacagagtgctgatcaacattggtgcggatcactgacgtgtgatcactttcacctgtacatcattatcagttcaaagcctccccctgccccgtgggcttgccgtgagagggaggctccatcctcttttttaacataagggcaggagggtrtgcacactccagagatgtgtgtcatttactctttgcagcttcagcaattgagtagactgaagaaagatgttcgtgaaaggtggacttttctttttatcatcatttgccctttttctagatttttcattgtgaagtgtgttatatattcaagactttatatcatgtcatcaaaagcctaaccataaaataagtcttgagtatgcccactgtactgtatggagcatgaagccggctttttgtgcagtctccttgttggaaccactccttgaaatttgggcttatcatgtcctgacttttctggacagttttaccacataagatagtttgctaaacatcttccccgtatttaaaatgtggcttttgtgtaataaagccctgtggactccatagcagtaccaagtttacaaaactaccccagtaccacggttttgtaaacagtacccctgtttgcaaaaactggctctgttttaaaatagcttagatggcctttatcccaagtgcttgtgttttgattattctctgatgcagaattaaatgaagaaatttgtgcacgaagcaaacttcacctctgtatcccccaataccacatgatctcggctcactgcaacctgtgcctcccaggttcaaacaattctcctgtctcagcctcccaagtagctaggattacaggtgcctgccaccacgcccggctaatttttgtatttttgttagagatggagtttcaccatgttggtcagcctggtcttgaactcctgacctcaagtgatccacccaactcggcctcccaaagtgctaggataacaggcgtgagccatcgcacccagcccctcagttttaattctataaattaatggattttatagtaggatgttaggacaagaaatttatatgtcattacatatacttggggattgataagaatttatatttctttttttttttttttttttttttgagatggagtcttgctctgttacccaggctggagtgcagtggtgagatcttggctcactgcaagctctgccttccgggttcacgccattctcctgcctcagcctcccgagtagctgggactacaggcgcctgccaccacgcctggctaattttttgtatttttagtagagacagggtttcaccatgttagccaggatggtctcgatctcctgacctcatgatccgtccgcctcagcctcccaaagtgctgggattacaggcgagaatttatatttcaatatagcagaaaactaatgaaaactttcgaaccccagtcccatccacttctgttttaccattccacattcttgtgtagtgagtatggttctgaggcagtggtcactttgtgaygcagtcatgaaataaataggagagaatctggccatacttgtgtttttccagatccaaaggtaggataagcctcagatgctgatgtgaatttagtgaggggtcctgatatggcytgatgcccttgctgttactctggttgagcacaaatgtgtccttttatatcatatatccacttgagatcttcaaggcaagcaattgaaacagactttggctggcttaggcataaaagtaacttcttgagagataccaggttatctggtggactcactgtaaagttgtaggaaccagacttagaatatgggtggggaaaaagggaagccagagccaaattaaaagtcacaccagagagccagcttggggagccatcactgctgctcctgctgaacactgggcatggggccggcacggccactgctggtgttggccttggatacggttgcttggtgctgctggacctactggcctggcaactggctgctgccaccacagttgccaggatgaagtttctctgttctctgagccactggccccggatttgaagccccaggatggatgtatatcattgtctatgaccatgatctgtgccatgactgccagagagtctgaaaaagaaagaatctggctatcttgactgctgtaatggaaggggctttgtttcccactaagattcacatggcaggaaattcatcaaatataggaagggtttcagataccagaaggccacagtctgacaatacataatcaactcattttatctaaaggcattcttttgaacctttaattttccttcttgctgacatctttattcttttaagccccttattaatagtctgtatttcaagtaggagaagaaaatataaagagatatccttcagttccttttctttatagctttcttgaagtttctataagcaatactaagaggtaatatagcctctgtcacacccccaccccaagaaattggattggagaagtgaacacaccttctgagagtgcaactataaaataggcctagaatggatcagatgaaaggaaataaaaagcaattatttaagtggggcttagatgttgcttaaacttggcttttcctcctctataaataatcaaattatagatctccagggacctaaaatgttaattttgggatgtatgcctcattgcaattcaaagataggtgggtgcttaacatgaggaagtagagtttagtgattacaaacagggtgttggggttggacagacctgggtgcaagtccttgttcagctgtgtgacttggggcacatttcttcaccctctgagtctgtttctcatttgaaaaagggcagtggtaatctttatctcacagagttggtatgggaattgaataaattcatatatgtaaatcccatattaagtatttagtaaatagctattctcattctaattcctgttataggagaatagaggagaagttggttctcttaaagtaaaaatgggttgcttttggaggaaatgtcaagcagaggtcagttgacaatgcaatgggtgttgtagaggaagatctagcactggggagtaagtgtggtggactgagggatgtcccaggttcccttcgatagctaactctatggtacagtaactctcttgagaactcagacaaggattagtcctctcagctgggctactcctgatgttgatggtgaaacaccagccactcaggcagtgtccatcaatgtcaaccctaatctggaaatgaactgaccaggccaaggtagaagcctgttggtctgtccaactagtaacagatccgtaaaagtgacagccacttttaccaccatcattatagctctgaccactttccctgacttgatttggccaatgtgttgtgtgagtggtggatggaagaagctaatacagctatggccttcttcaataatggtgaggtaccactatcatttgcaaatcagttcaaaaataggaggtcttcccagctgggcactaagagctaattctcttgggcaattttttttattgcattcaaccatagamgattaaaaaacaaaaaagaatggcattttctcctcccaaagcaaaacctcttggattcatggtctatcctaattatatcttctggggtaatcctgagaaatcttgtccattccagtagagcctgtgctgtgaatcarctgtaagagtgctcacctagttttgctacagtgcaagaatttcaaggtctaaactctatgaacaaattgattagggtaagttattgcctataatgtgattaaattatactataaggaattattttatctgatggttttccaacatgagagctcaggcagaatagcacaaaggatgagattatagatctactcatgattttcaagtacataatacactgttcttaactatagtcaacaccttgtgtaatagatcccttgaacttatttctcctagctaactgaagtttcctatcctttgaccaatatctctcccacttacaactctctgtccctagcccccagtaaacaccattctactctctgcttttgtaggtttgacttttaaaattttcacatatgagtgaaaccatgtggtatagtgtttgtttttctgtgcttggcttatttcacttaatatgatgtcctccagattcagtaatgttgttgcacatgacatgatttccttcttttaaggctgaacaggattccattgtgtatatataccatattttatttaccattcatccattgatggaaacttaggttgattccatatcttggctattgtgaataatgctgcaatgaacatgggagtgtagctatctcttcaaaatgatttcatttcctttagaaatctacctagtcatgggattcctggatcatatggtagttctatttttaattttttgagaaacctccatattgcttcccataatggctgcactaatttacattcccatgaacagtgtgcagatgttcccttttttccatattcttgctaacacttgctaacttttgtcttttgatgatagctgttttaacagatatgaggtgatagctcattgcagttttaatttgtaagggaaatgcacatttaaaaatactgtgagtgctagtagtaaatgtgggatcctaaaaatttgcattggaccacgtgaagaatttcttttgtgaggccggaaaatgggctaagagtcagaatgacctagtgttcgtctttgtttccatacaattcccaacctaccttgaggtccacgtctgaatttggctgttgaaggctttaattttcaaggaaaggaaaggtctgcctgggataagtcggccagcaagtcagcagaagcaagcctaagactaaggaaacacagatctacctgttgtctaaggccaagctggcatagatacctaactctgggtcttctctgtctgggggcaaaatctccagccttgaataggagtcagacctgttatggtggctttcacctgaagtcccatctactcacgaggctgaggcaggctcccttgaggcaggatcccttgagcccaggagtttgaggctgcagtgaactatgatcacactactgcactctagcctcgacaacagagcaagaccctgtctctaaaaagagaaaagaataaaaaaaaggagttaaaagttaatatagaaccagagagagagggaacaggtcttctcagatggggtaatccctggtttgactttccttctagccccatgagaagaagacccgtaagaaaataagggaagaagccaaagaaatatgtggcagggtctttcccaggtggcagcagcccaacccagttcaccttcctgacttcataaaggaagacacaggaggcttttcttatttttactcctctcattagactccaccatctgcaaaatgttgtctaataataaactctcaggatcatctattttaacatatctgctcctttgtgggaagagtgagtgtgaaaatttgggaacatgcgcagtggataaagctgttattttatgcaaaacagaaaagagcagtgccccctttgggtggatgtagccctgtaccagtgcacacagcttggtattctcaaagaagcccacaaaacaaccaaggaggctgttccagctgggcactagtagctgattctcttggtaaccgtgggctgggttttagctktcacatgcctgcttgagcggagtacctttgtgtggtaaacaacctggaccactctacatggtcccctggtggtggtaatgggcaggcttaagcggtgtgatattggttagggggctcaaacaactcatggaatgggcacctaagcaaggtagagagatgcagagcggggagggaggagttctgaaggggagtttggcttgtttgctttttttttttttcttctatcttggcaccctttattaacagaacacagtgtagattatgcattgtattttgaaaaagaaagagaaataaaaggcgtaatctttgcttttgagatgttttcagtctaactcagcaattcctttccctcatcctttctgcctcactacttattacatttacttctagttcttcctctttaaattgaaaaagcagaggcaaaaccagacactgtgataatggaattttatgttgtggtctttgattacacttcccttccaaagcttcaatatttcacattgttaataataatgttctttgtaggaaaaaatccttaatttgaaaatgttgcagatggccttttatcaggagctatggactgtcaaaataaatagatataattatgaaccattgttgttgaatgggccatcttaaataatagcagtcaagtttccagaaattaaaaaaaaaaaccttacattttaaaaagacctcagaataattagtggtctctggttgattggttttcaacaagttattcagcagatggaggctgtcagatttctgctggtacgattatttttgtaactcagtggtggaggggggtggtttatgcaactcagcatcacctctttgttgaattggatttggtttaagagaatcccaccgcacctgtacattaagatggagcatgaggaaggtcttgggaccgagccatttgaagaaaatctaggctcyggtgggtcactttaggagtattagtatagccttagacattagctcttggaactaccctgaaggcgaaaatgtgagacagctaatatttctctgcaagaattccttgggttgctgagttttggttcttgccatcaagaaaatgtttgtaccggagcaagatgtggaaaaccccagatgagaggatattaatgtagattcatgagctctgccaaagtaatgtcattactgctgctccatccctgaagaaagatcttaaacatatgtaaatagacaagacaagttataaattgtaatttagtatctggtaactgaaagtctttacttcatttgtactgagtgattacctgaatttactaaggaaaattttggaggtcacagatttgagttgaagtcaataaaataggataaaagtctagatgatgaaacttagcttttgttgattagagttctgtttagctcttaaaactgcagtaaataaaatgttatattagtggaaaatacaaatggattcagaaaatatagacaaatcgataggcaattgaaatgtatacattttattttcaacatatcaaacctcgagttcaaagttcttcataaaaacacaattcctaaattaactttacaataactgtgagcattcttatccccatttcagtgctacaaacccaagttatggggagaaaactttaaaaggaggcaagagctgccactataatttaaaatatattgttctccactctttttacatattcttgaaagcagttcattaacggtgaccttgtgtaggaaaaattagcatttgtgccaaaaaattctttgtatgtgttagtttgtgtgcatattttggagtcttcatgttaaaagtataggacagacctacttgacaaaggtgaattttgtcgaaattttggggagaatatagatttgaattcatgtaaataagattgaataaaaatccagatgactgaaacatatttcatcttttgctaattagagctttattgagcacttaagctgcaaaaaataagaggttatattagtagaaaatacacatggatttagaaaatttaggtaaatctgtagataattggaatataactcaggaaaacattcaatgaaacctctttttcaacacatagattagtaccctaagagagttaaattagtgttttactgtgaaactattttcttccacaccagaatctattgtatgttggcaaagaaaaatggactagccattcattatcaccaagagtttattacttactctggccacctcagtgttcagtgggtacctaaagtgaaaagagttttaagtgctacctttgcagtattaagtttgagtgaatccagggatatttgctgtgagtgtggcaaaatgattattgtggaattggttgttgaatttgaattttttgttgctggcaaaattcacattgccaagtcctccttttaaattgaagagtattttaagtgaaatgcaatacaaacatatcttattccttgaacttcttgattaaattggtagtgttttttatttgtagtaggctacttatagagttctttttcataaaacttgaaggttcttcttcataaatcttgcagcttcaaggggaaaaaaaggaaaaaagaaacttatttcctcttagacccttactgtcacacctcaagtattggacacaatgtgcgatgcttaaagactctcttggcttagaaaagcctttctcctctcttggcaaatcaggcaatgtgaaatcagtaagggcccagttctcactgttttcctatgaagttgttccgatgtgtgacacatccaccttatggaggtttaagttggttgtgtcttgaggctcacaaaagcaggttgtggaattggtataagcatttgatttatttgaacatatctggtggtgtgtcattgactgacccctctgttataagctttccttcaaaaaaagtccatcagagacttgaagtttcacaatcaaagctttgtttactgggcatatttttcagcctcaaggaaatcttccctggctccctgtagaagcaatagttacaccttccttaggggaagaacccgtttaaatgtgttgcacatcttcacctcttttacttgaataagaagtttacaatcttccctgtggtatccttcttaggggaactctaggaagaaatgtttgatcatgagagtggtaactggaagcatgaactggagtacggtgttccccatttaaagaaattttgcttaaatttttttttaaatggctttccagaggtcaggcaaaggccagtttccccttgatattgggaatttcagggtgggattaacaaaaggctagaaaatgaagatggaaagggatttatagctacatagcagcagcatggacaatttcctaatgtgcatctctaattaaatattggtgtattagcttattaattacttcaacaaatattcattgagtatctctgccaggcaagaatctgggcaccagagttacaaaagtgaatgaggcacatttttcttcctgagggagcctagaaggaaatatacaattaactacagtcattgtttctcacactaccaaatgaaagaggtgaggcttacctgtttctcaatgtcgtttttctgaggacaaataaatgaagaaacttcaactagaaaaaacaaaaatcatattcacagttggattgtctgtacaatattgtcatcagtaaatcatgtaatggtattataggacttggactgagtgtgacattgccaatttcagtttgtaatttgttcaaacttgcaagtgataatgtggtactttattttgaggagcaaaacaataaaaaccatcagtacaaactcagggtatctttggtcctagagatctctattcacaatgattccttacactgtgtgaagtatgaaagttctataaaaagatttctccacaattcattttataatagtcctgtcagtaggttttattaactctacttttctgttgaaaatatggagtctcagtaattgtgattgagttagtcatcccaggttataaaaccaacagtttcagaagggtcttgaatgaaatatcttctgcctttcaatccagggaagtttgtactatacctcaacaaggactaaaggtaagggctaaacatggaacatcacagctatcaaattgatgagagaggccttatcacttcttaggttgctcaagaggatgatgtgagcagaataatggcccccaaagaggtttatgttctcatctctggaatctttgaatacgttataggacaaaggagagttaagattgtggatggaattaagattactaatcagatgatcttataatagggagattatcctggattatcctggtgggcccaattcaatattttaaaaggtaggcaggaaaagagagggaattgtgactaaggaaactaaggggcagtagtcagagggatataacattgcgttctttaaaaatggaaaaaagggccacaagccacagaatgtggatgatctctagagctggaaaaggcgaggaaagagaatttcccctagagcatccagaaagaaactcagccctatgaacctcttggttttagcccactgagactcataggacttctgtcctatggaactgtggcatgataaacttttgttgttttatgccactaatggtaatttgttaaagtagcagtaggaaactaatctgcggggtggctgttagagcctgatttatagctatctaccttcagagcagacagtgtgactgggagccccctgtgatcaccatgtggggatgttataggttagatcaatcatttattcaattatttattaataaacatttattgcacatctacttggtacaagtcactgttctaggccaaacagtaaacaagacataaaaaatcttgccttcatgaagctatcattgtagaaggggaaagataataaataagtaaaatgcatcatatattagatagcgataagtgatgaggaaactgtgaggaggtaacagtgataggaagcagtgtgtgtgtgtgaatatgcatgtgtatatgtgtgcatgtttatattaggtttgtaaattttagatggggcttctagggcaggttcactgagaaggtgatatgtaaataaagacccgaggacttcttttaggaaggaagaaacagccagtgactttctatcccaagcaaaggaaatgcaaaggctctgagggcagagggttcctggcacgggagggatgggagatggtgaataggtgagaatgtaggtaaaacttccaaggtgccaggttgatttttttaatagtagcttatattccccctcaggccaagccttggagattttctcctcagctggtggttcttgttttttttttttttttaaattatcatttctactgcagagaaaaagcagaccatttccaaagggcagcctaagggagctggaggcagagagtatcagagagtgtttcagtgctgataaccaattttatggatcagtcattttaattaataaggagaatgggggaaagtgatgcaaacaatgtaagtcctggttggcatttccttgaatgttgaatacctcttacttttcaaagggtaaggaatttggttagtgactggaaacaggcagaattggggttgcgctaaactcaaccagaggtcacagagtactgttggcaaaggttggcctctttttcttgctgcacgtggctcgtatttaatatactactgcagaataactttgatctctctgcctttagacagaagtcaccaccactatccccctaaagctattggctagcatttctttaaacaagcaggctgcacagagctcctcatgtgactccagcaggggaggaagggaggaagttgcatgggttggacacccagagctaagaagtagagagatgtaggtagaagggccagccaattggcagcagtaggctgcaacagccacacacttgccccgggaagtgggaaataggagggatgctagagcttggtttctaacatggcaaagatctatgagagcgagagagaatagtaatggagtaaaccaaaggaagaaataagatgcctccagagggatatggcagctttaaaacatggcctcaaaatcctttgacactccttccatcaagaaatggggtctatgtctcttccccttgtatcctcttgtgactgcttgaccaatgggatggggtagaggtgtcagtttctggtgcagaccttcagaaatgggtcgcttctactttgtgtatcctgagaggcttgctcccagaacccagccaacatgttgtgaagaagcccatagaaaggcccgtatggagaggaaactgcagtcagccatgtgtgagagtcatctttgaagcagatccttcagcctgtcaagcaattccagccgacattacatggcacagagatgagctgtgccttctgagccttccccaaattgtagatttgtgagaaaatgaaatcactgttgttactttcagctactaagttttaaggtagcttgttatatgtgaacgattgtaacagggtgcattttaggtgactaggaaagagaaataccaggtttcatgcaatattgaggttgctttgttattcaagtatataaaatataaatcatatgattaaaattttttaatcatttagagtttttttattctctccttcgaaaaatgcacatatgccaaccttttgaatacagtttcaagagtctgaataccttctacatccatccatgggcatagactccaagctgagaacctctgtggtcagaatttcttctcactactgtgttataaagtgcaatttggtgtaagcttagggaaggaagagggagaagacactggactttctattgttagacttgtattttattccaatcctttcatagatttgctctttgattggagataaagtgtaaaacctctctatatcatattctatatctatatgatattctatatcataatttcttggatggcaaaatgtggattaaaattctgtcctttctttcctcaaaggaatgttgaaattaaaaaaaagaaaaaagaagtgaatatgcttagaaaagccataacttgcccataagaggtacacaatgaatatttgttgaatttttagctgtcgttattgataatggattacttaattaggtcgctgtggtgttatgatatagatacttgttttcatccatggttcctggcttctagctcccataatccttgttataatgttggggcactttaggcctcaggaaacggaatctttccctctaaccttctcctgtcctcctttcacttgcccaaggcaggactctaatctgattgtcggtcaaaataccctcattccagatcctgtcctatgcaggcacatggatgaagctggaagccatcatcctcagcaaactaacacagaaacagaaaaccaagcaccgcatgttctcactcacaagtgggagttgaacactgagaacacatggacacagagaggggaacaatatacaccagtgaggggagggaacttagaggatgggtcaataggtgcagcaaaccaccatggcacatgtatacctgtgtaacaaacctgcacgttctgcatatttatcccattttttttttagaaaaaataaagaaaaaaccccaaaaaaccaaaataccctcattccagaaagagtcctgctctatacctaagaggaatgaatgctacacagagaggccaagaaaagtctgagtagataggcattgatgggtttagatcatgcactttttgtccaatcacatttctacagggttgtcaatcatgtttatgtaatgaagcctccataacaacccaagaggattgggtttggggagcttccagatagctgaacacgtgaaggttcttggagggtggtgcatctacggaggacgcagaagctcatgcatcttccctcatacctcaccctacacatctgtatcctttgtaatatactttataataaactggtaagggtaaaagtgttcccctgagttctgtgagctgcttccaattccagttaatcaaacccaaagaaggggtcatggaaaccccaacttgaagttggttggtcaaaagacaccagacttctgactggtgtctacaggtggaagcatctttgggactgagccctcaacctatgggatctgatgctatctccaggtagatagtggcagaattgaattagaggacccccagttggtgtccactgcttgatgtgtgggggcaaaactccacacttcgggtaacagaaggcttcttctgtgttgatgactgttgttgtggtggcgtgagagtagaggaaaaacacggtttgagagagcttttcctgacacagaagcccagacctttaagggcaaagttttgtccataaaacaaccctagaacaaggtccccagggaaaaagcaccaaagggtataggagtggaaagagggggtcagtacaggcatctctgcccctgtcacccatgttacattttaccctctgttatccttcattttatagtcagtgtaggggaactaggagaaatggtaacacgcaaagattggtatcagtttacaccaaaacagaacacactgctggtgagcacagggagttggaaacaatatacacaaaagtctcacaaaatagaaaagaacatggatactggctctaacattgacgtcattgggatacaaagtctatttacattgtttcttatgaggtcagcaaaacatttcaaatagcaactccttggctgcctgcagtgggtctgcaaatgtgaaataaaacatgaactgcagacctgacttatgagcaggacgttccaagtttccttctttgctttttctgtaacagatcaccttgtccttgttactgcattggtagatttttatcatctcagatgaaagaatcctagtgttggccagggcaaatccaaaacacaggtgatgagaggcaacacccaatgttaaaacctgatccactgtggttatttttctttcccattgggaaactataaggatgcaaatgggcaggagagtaaaagcagcaatcacgtctgcatggactgaaggcaatttagtttctatcagacatggtgacagtgatcaatgcatcacaaaatcacaaacaacagatgccaagcacaaactgtgtcacagatcccagatcaaagatatctaccatatgtttagctttcacatcaatgtacatcaagtcagttttgaactagaagcctttagatatacagttcattacttctttctcctttttcatcctcttttgtctccaggaagttcccagaatccgaatttaatcattattcaggtttgggtatatttgcatataaatgcattgcttgtgatggatccagtgaaagttcatgcgcagggctgcccctgcccaatgctgcactggctttctgccccatcagtgctggagctggcagaacccccctgcagaggaacggaagcaagtgacctagaggggcctgcaaagagtcttaggagggcaattacaacacgtgtttcttccttttaggagtatctaattgggttcaatgtgaaggcagctcactgtcaggcacatagaagagactctgagttagagaggttgaaatgtggtcacaaaatatccatgaatgtattaaatccataaggatttattaggggctcttaagcatttgattccctttaaggaaatcactgctaataaagaggcacacagcttgagaagctgaagcagagtgaaaaaaattgatttatagctcataggtagagaaagcaaaattcctaattagtcatttttttttaaagcacgtactaaagggaaaattactatatatttttttccaaagtttccttggtctggctgttgtttgccattttaattacagatttattatttattttgtataatatataactcaggaattattattatttaatttttcctcttttttttgcattgggcttggtgctggggaaacagagacaaattatgcagagtcctttcttgttgggaattcacactctggcagcctggtgtagccatgtgcacaaacaactactgtgcaatttgatgagagagacagaaggcagggcagtggcacaggtggaagtgcccagctagggtacaaggaattgagggaaggctcttgagagagaaagagatctgagagctgtatcttcctaaaaagttggtgtattccaggtagatgaaaataggattgggagacagaggtggacattctgagaagggggagtagtaagtacaaaacagaggtggcaatagcattatggacttggggaccgttagtaggttgataggattatagcacataaatattagaccagaaagactgagaaatgatgctggagaagaaagtaggacacaggtcatggaatgacttgcaggctgcaccagaggcacttggattttatgagagccttggaaggtttctgtggcaagtgttgccagtgcccctctcatattcccttggcagtcactgttactgtacaagacaacagctacaagtctcagagactacaagtttgcaagactgtaatgaggcaggcccaaagcaccagaagttaacatccttgagagcatcgctcagacaatgatgcatgaatagctcagattcttcacccctggtgaggatgagtctgcagcaggttttgtataatatcttggaggttcccggtgacattgagtctcacctgatcacagcagttgtctggtcatttacacaccagtattgttccttcccatacttgccattcttccataccctcctacattttgcttcctggaatcccttctcgaaaaactactcatgcttaaattcttagctcaggctctacttctggtggaatccaatctgggacaggtttttggcttgtggaggaacagtggcaatgaaggcggagtctggatgattttcatgagaatgcaagagagagtggaagactctggttcaatttagaaagcacagttcgttgcaattatggccaagctgtatgtattctgggagacagggaaggacttttcgatgattcaaggtttaggtttgttgactggtgggatccattaagcaaaataaggaatacaagaagaggaataggatttttggtgaaatgtgtgggatttggatttgattatgctgaatttgaggtatttccatggacagtgtaggcattggggaagaggactagttgcgacaccccagtttggaagctgagcatcagcccctgagtagtagtagaagaagtgggtgtggctgtggtcactcaagctgagtgtggggatggggagtaggaagaacccaacagaaacaaacttctgggagtaccaacctttaacaatcaaatagatgaggaggaacttgctacagtgaaggagtgatctgtagcaccaggcaagggccaggggagtgatgtcgtagaagccaagaaaggaaatcatgtcaggaggagagaggaagcaaacagagtcaaagactgcagagaggcttggcaaggtcagacttcaggctcccattggatttggaagttgagtggtcattgtttatttaagaagttcatactaatttggatcaattagaaaagtagtagagattacctccacttaagacatttagttttattacttgaaaactaggctaaccaataattgcctaggacagggattgctttaatgaataggtaagaataatttctaattatagggtggcatgatttgcgttaccatactgaaaaatgctgcccctctatttgtatgatttgtatgaagttcagtacttggaaagcttcaagtttgttcacctaattaggtaagggtttttcttttaagctagttgctgttttttagtttcaagttggtccctatttctgtttgaattatcacaggtttcaattttatgttgccaaaagataagatttaataccatagctgatgcccctttgaattttgaataacaattctattttctttatactatttagttatttgtggttaagaatctggtctgtagagttagactgcttagctattacagtagcttcaacacttactctttaagatccctgggtaggtactgtgcttctctgtgccttgatttcctcatctgtaaaatggagagaatacaactttttttcagaagttaattcttagtaccaaatgagctaattcatataatgtatttaaaggcattttaaatggcacagagtaaatgatcagcacattttagcgttagaaatatttgttagtattttttctatttataatttgttactattactaaaaactgggaggcagaatagtataaagtgataatgattgaactataaaacagattagggttctgctctcaaattttccgccaactctctgaactgggacaagtccattcacctctctgagttcacattcttcacctataaaagagggaggttagaatagaacatctttcaagccagccttagttttaatattctgggaagcacaccttttgcttggaagtagctgatttacacagtagtcttagctgtagtgtgttttcccctaagggaaagataaatgggctaaaaggagaaatggaaggcatttccattaggcaattgctttctggaaagtacaactaatgttttggttggtttattttcatagaattcatttcttgggctaaaacataaatcagttactatattcagagggcttatcatttcttttttgagtatacttatggttggaaaaattccaagtgtttttcatttttttgccctgttttttcataccttttacagaaaaataattgtttttagtgcattcatttcatttgctaatgttataatctgtacaaaacagcccacctaattattcttttagatgttaaacatgacacatgtaaataaaatgataattatagaatgtggtgttttcttgtatcttacattttttagatctgaaaattggtccctgttcttattctgcatgtactccagtgaaactttcccttgatgagttatttttcatgcgcacacatgggggagcttttgagacactagtttgaatgttacactttgaagactttctcaacaacttgaccctaagatgatggactggaactcttcattgaaggaagtgtagcagggtgcaactggctgtagaactgacttccctagcgctcactgtctcatatgcagccctagaaccaattcataaatctctttgaaagatagccataaacatgtattctctcacacaaaagagtagggctaagaaaatgaaaacgaaaagtgaaggcagatccagtattttctaaaacttcagtaagaagtacctgaggtcataaacttggggggctgcctcttccggtgaaatgggggaagtcagccagaaactctgattttgacagcaacattatttaaaggagtttctgaaatgatcaaacatgttcttccatagaagaataaaagtctaaaagcacatgagaatatttttaaaaaatcacctctggaggaagcagaaacaaaagtgagtggcttgagttgagtccgatgctcttggtgtctagctctgtttgccatttaaagaaaatgcagaaaaatagaaatgtgttaagtgaaatgaaaccccataggaccttgactgactttattgttatctttcttttgaccctaatttttggggtagctaaaaccgcaaataaacatatagaaatagacctggtgttagccacatagatacatgaagtagcatcaggaatgactggggcttttctctgccccagtttatttggaaataactccaaactatttcatatataaatatatatatatttcaatgcttatcataattacatctgaatattttgctcataagacaaacttctaaatgcccttaaaatgaggcttcaatgaggaaataaatacagctgattttaaaatgttatttagtatcaagaaaaaactctttagcaaatatttcctgtgaaaagtatacagtataactagcttaatatataaaattaaacagaatctttcatgatgaattgaaaataggtaaaatttgttttccttctcattgttttttcatatgtagacagccaagtttcatccttcacagtttgtgttcaactccttgctgtttttttctctaatcttttcctcagtgccttattcattctcatggttttaaccattaactatattcccattctgggctttcatcacagattccagttgtacattttctattgcccattggatgttcctacctggatatggaagtcaaattgaatgtcagctaccaaatttaccttccatcctccacttgcttcctcggcttctttctttacccaccctcccagctcaccagttccttctgactttcccgtatctgttcactaaactaccattttctgaatcacctggccttggaaatttggtgtcatctttgacattaacctgtctcatgtacactactgtatcaggggttcccaaggccaccctcagacttgctaaaaggatgcatgggactcagaaaagttgttatagtcacaattatgttttacttagtgaaagaatacagactaaaatctgaaaagcaaaagatatgtggggaaaagtccaggagaaattaggtgcaagcttctaaaagtttttttccagtagaattgcacagatgcacttaattctgcaagcaataccgtgtgacatatgcaaagtgttgtcaaccagggaaacacttgagctttgatgtttttaatggaggccagccacatagtcatgcagcacctgtatgacttacctcagctactcagacttcagctcctcagagaaggaacaggcagccatcatgcatcacattgttagcataaactatctgatcaaactggtaccacatgctccaaggcctgaggcatacaacactcttaccaggcagaatatacctgtggctcaaggcttactctcaggagctggcctaagttcagtcttgaagagaggtttttcttgggcatgtgcagggcttgagccacctagatttgctgagttaatcttactacacatgcacgaaaaatcaccaagctttgttggttactgggaaaattcagagcacatactgtggtgttagatatgtgtttgagttctgcctttgagacgattaaatgagatgtgattaacatactgctggacacataaatactaagtgatgtcgatttctcgttgttgtgatttttattatctctgcccttttctatccaatatcacttcttatgtttagcctaagaccttattgtgttcaccttcaaggtgcactagcttcccatatcagtgaacttaggatgttacgctgcgctaacaaacaatctccaaattggtatcacttgctaaaacaagagagttatttcttgatgctgccgtttgtctattatgagttgactgcagctctgctccaaagtataatcattctgggaccccgactgaaggaacagccctgatcgggacattggggcaaaaagaaaagagcgtattatagaaccataaaatggctcttaaaattttgcttgaaagtggtgcatatactatgtattcccattttattgtctaaagtaagtgacacatcccagcctgaggttattggattagggatgtatactattcccttggaatgtttgagcagtaatataatctatcaacttcctagctagcctctgtgttaaatgatcattagagtatctaaagaggctggaagcagagaggccagctaggatacactaatctatcctgctgaccatcactaagttcacatcctcaaagttcagtgttgacaaaccatttctgttctctataactgccgtatcatggtcttctcttgattagtcacgtaagctcatttttaagctcaatcacccatgactttcctatacgcaagtgaaaccataaaattaaccagcatcgggcacattttatcttagcaccttttatacctttgctcatactttcactgagattgagggctcttttttgaagatagttaccatttcattcacctttgaattctccagagcccaggtaccttacctgtggtcatggctgaaacatgtaatcaattaatgtaagaagaagtattgtcccagtgtttcaaagaaatccaggtgctattcaatgacagtgagacgtcaggccaagggggtgaagggaggctgaaacccagtccatgctttgctcacaagccaagtcctgagatgggatgaggagaaagaggtgtctttttctaatctcattaaagcactgagtagtgtggtgggggcttttcttctggggttttgtttactaaaagacttcctacaaagaacctgtaggccccacaaagatcatatgcatggacattattgtagggcagcaggagaaaaatgctattttggttctgctttctagaaattttcaagtgctgggctaccaagtcaactagctcctctgcatcctttagatgtctgtggctgaggacagcttcatgagattgggtcctcagagctgctttgcacttcccaagaatagacctgtggaccatgtcctttttgtccacccaagttttatttatttttgggacagcacctcttttaccagagaaagtaactcttgcggctaaaaatataccggaaataagaatgaagaaaagtaactggatcagctatacttggtaaaaatacctaaagctctgtttcatgaaagtgtttctaaaaataaaaactagtccctggcaatgcagcaaatagccaaaacgacttctttggttgattggttttaatgttttttttttttttcttttcctggttacagttttaaaaactgctccacaagaaatttcttccaaattcagtgccaatagggagcattgcctattagcaggcacacaatagttaagagcagaaaggcatgcaatagggctttgattgtccaaggcagggtaaccatgtatgtaggacctttattgctgcctgggaggtgcttcagtgtggggagtaaatgctcagtcaaatttggcataacagctttaaagcaagtggaaccactgtgcatgttgtcagcaacatactgctttctttctttctttctttctctctctctctctctttctttctttctttttctttttagtttttgagtcggagtgtcgctctgtcgcccaggctggagtgcagtggtgctctctaggctcactgcaatctctgccttccgggttcaagtgattctcctgcctcagcctcctgagtagctgggattacagatgggcaccaccatgccctggctaatttttgtatttttagtagagatggggtttcaccatgttggtcaggctggtcttgaactcctgacatcgtgatccacccaccttggcctcccaaagtgctgggattacaggtatgagccaccatgcctggcccttttttttcttttaaaagtattttacttatgtttctattttgtgtcaagggggctggttcctagattactgagggaataagccaaacagagcaaaatttgtgtcactcatattaaggtattaatttcagcactaatgagatgttgaaaaacatggcaaaggtgattagaggatattgaacgaaggtaaattaagtaggtaaacttggatccttatgttcggaatcctggtattaggagtagagtatggagctaattgcactgtggttggaaagggttttaaattatagagaagatgaagtttgatcaacccaacatgtgtcccctttactagtgggaagacacaagggcattcatgtcaccatgaaatattcttattaatttattgaaataccagtgtatttgtggcattttgggattactatcattaccataacagaactgttcttgcttcatatttatgcgctccaagattgctctaaaattccttcatatccaactgggcaattatgattcacccattggacaaaacaatatagttctattctagcactcaaaggatgtagtcatcacttccaagagtgagcagactttctggagccaggtcagaaagagacattaatgttgtcttcatttaaatactatgtgtagaaaagacctatgtatttcccattgagaagatggatcatctttttcaggaattgtttttcatctgtagtctcatcagatcctgttaatatattttactttgcctttgcttttttttccatttgaatatatctttttctcctttcagcatgatgaaacgtcatttaattataaatttttgtcttcaagacctccctttaagcctttaacggggagtaatataatgactactggtaggtacagtcagtcagtcagttacctctgggatcattctttgcagttcttggctcttggtttctgtaggagttggcaggtagatgccaaattttctgtctgagtggtcactcatgagatctttgactaaactcatggattgtttcttatcgaggcctgagttggccctgttgtctgttttggctaataaacaatatttggtcagaatttgaagctgatagctttctctcaatgttctaaatagattctattcctttaaagtggttaaagtagaacaatccttcaatcccttgatctgatttatggcagtagtaataaagaggattgttaccccaaatgggccagttgtttatgcttgtttattcatttattctggaatgtttgagtgtccacgatatgctgactctgtgctagatactgggggttcagtagtgaggtccaagtcagatatagtctttgtcctcatagtgtgtaaaatagtgaaatctaatggggaatacagaaataggcagtgacaataaactgtattgtgaggaatgctataggcgagaagcacagtgagctcacaggaggcacatggacaatatttggttgcctgtgtttaccaggaagtgtgctaaaagctgagtttacagttaactaacaaaatagacactgtccttgccatcgtgaaacttactattggtgaaagtcagtgttgactgaataattacatacatgcatacgtacgatgttgctataaaggaaaacacaagttgtgatgaaaggctctatcaagggttccaatttagactgagtgttgaaggaccatggatcagaggttgagacatttaggctgagacttatcatttggagatagtcaacaaagaggcggaagagaaagtttccaggtggaaagaacatcacttgctaaggcctgggacaagtgggaatgggagaatgtattgagcagaatgtttgctatggttatgtcattgtgtgcagtgaggggtagaggcagagggaaggaccagagatgccgatgaagagtgaccaggatcacatcaccagagcctattcaaccacaggcaagtgtcttgactttacctggaggggaatggaagagctactgagtgttttaaacatgaaggacatatgagcagattgatatctttggaaattcgctgtggcttctgtagtagattgaagtgtgggatgcgttaggaggcctggagactagggagtaggaggctgttacaggaaccccggctaaacagttcactatagagtaatgctgggagtgtgagctctggggccacaatgtttgggcttagtcttacctgtgtcactcaatagctgggaagctctgagccattacttttcttctctggcctttgttttttgcttctgttaaataaggatgatgataacaatgatgcttatctcatagggttgctgtgggtttatcaccatttagtgctcagagcagtttgtggcccattctgggactctgatattcataactataagataataaatttgtattgcttcaagttactaaattggtgacaatttgttaagcagcaataagaaactaatacaggactttctgacgaggcctgacagttgtaagctgtaaaaatctgggaatcaggagatatatatacgtatgtttagatggagtcttgctttgtcaccaggctggagtgcagtggcgcgatctcagctcactgcaacctccgcctcccaggttcaagtgattctcctgcctcagcctcccaagtagctgggactacaggcgcgtaccaccacacccagctaattgttgtatttttagtagagatgaggtttcaccatgttggccaggatggtctcaatctcttgacctcatgatctgcccaccttagcctcccaaagtgctgggattacaggcatgagccaccatgcccagctggtagtatattataaaagaaatgatattagatacactgtattttgtgtagcctgtgccctccaaaaatgctcatggttgaggggccagtacaggtaggaactggctttcactgataagccctgtgcctagggaagagactccttttgtaatttatccatgtaaaaggggcatctttttcaaatttacacatagtcactttgggtagctaatggcagccctgcctggcacaaattaagtactcaataaatgatatctgttactaactgttgtatgtgaaaattactgaacctttctatgcccattttcttatctgtaaaataatgatccctacataataaaattggttataagaattatattaatatatgcaaaacacttaaaatagtgcctggtacaaataaggcatgccaaaaagacaaataggggtagggagcattcattcattcaacaatgtttgagagccagctatgcagaagcacagggctgtagctggggagaaagagacagatatgtccctgtcctcatagggtaaacaaaaatttaccctgataatgatttaaagctgtgatgtgttataaaaatgaattctaggaaatgtagacaatgaggaatatttgagaaagtttagaagtagaaagaacaagactctgattaaagaagctgattccagaaagattggaaaggtttcaagaaggagggcaaggttggccatgttgcccaccttcagagctagaaccagattacctagctaactttgtctatgacttaagaaatgaactgggatagaaattaaaacatgcaataatatatttagcatttatttgttgcactgtaaaattccctaaaggttataaagaaaaaaaatatacgtatacatatatatgtatatgtgcatatttcaccgatttttaagcatattatataacatgaaagatttcttacttaaaattatgaagtagcaaatgaagtctggatcctagctcattacagatatttcaggattggatttaatttatcatcttttttcccttttgaactgggaacaatgccctgatgatctatttggagaagagatatgatagtatcttacgtgacctgtgcttgctctattctgtttgctgtttcctgtttaattctgatggtgttgtggataagtgagatgaccttccctggagcaatttatgaaagcactgttgaatagagaacagaacatggtggaatattcatgggcgacttcagtagttcaggattactctcagaccgaattattcttcggagctttgctgagggcttagagtaccctaggcaatataaacgtttctttgatatgctcctcagtatttcttctttttaaagaatccccaagaggatttgcacctgaaactgtagctagtgccattcttttttgctctcctttttctcctcccttctttctaacaattcaaaatgttgatggtgtttttttggggggagagagatggcaaaaagtgtccattggaatttataggcatgtaggagaaaactgctttcccatacaacattatgatgccaacactcagttgtcattttgggggattgtttttgaactgaaggaaaatgtgtagcagcactattggataaatcagcaatcctggctcacctgtatctttcaaggaaaggaaggcttggtgacagtgttgagggctgtggtagtcacaataacagccactcaaaaatgtctctggaacccatgaatatattttgacaaggggggaataagttcatcaatcaactgaatatgagatggggagattaccctggattatctgggtgggcccagtgtaatcacaagggtcctcaagatggaagaatgaggcaatagagtaagtgtcagagtgacgcagcatgagaaagtcaagcatcacccagtcattgctggctttgaagacagaggaaggggccatgagccaaggaataaggacggcccttggaagccagaaaaagcaggaaaatagattctcctctggagcctcccagaaactaatgcagccctgttgattaggccaaaaagatcccttcttggcctctgatatccataactgtaagatcataaatttctattcttttctcactaggttttccattaggtagttacaatagcaacaggaaaccaatataggagctttctgaagagcctgacagttgtaagctgtaagaatctggagatcaggtagtctatatttgtaaaataagtgatattaaacattttagaagtggtttgcaactctcaggcaagtcatcattgagttcaataagactctagagaaagaggtagcaactaaacataatagaaaacccatcaaggtctatacacgtagagtaaatgaaggagactagcctggttggaagagaatagaggggcaggggagtgtggctgaccagagagtacatggccagctcctcatggtgattgttgccgtgaggaaatgtgaccacttttgctagatctagttttttcaaaagatgcccgcattttgaaatgtaatgtaaattatcctaatatttaactctagacaatttaagtaaaaaccaacaaccaaccaaatgaacctcaacacaggacgggtatggcccgtgggccaccagtctgagacagctaatctagaattgcagtcagccggagtgacttgtattttcacggttctgagtgtaacacccacagttccactttagagttgaagaaactgacgtaggggagttaataattgagctagtcaatggtaaacataaggtttcaaattgcggtgtgtctgattgtgaacgccaagtttttttccatctcactgcctctaaggcaaaggaggagattaataatggagagataaaaggagaaatggaaggaaagagtttaatatttactaagcacaaaatatctaccaggcattgaaccagggattttaagcacattatcctttaagtctcacaacaattttaagaggtaagaaatattctaattttccagggaagaaacctgagtccgggagaggtcaagtaacttgtacttggtcacacagagagtacgtgtcaaaggaaactcaaaagaacacattttctcagtgattacaggttttagagaagaggaacaatgcttcctctgagcctgaagaaaagaatgaaataagggctgcaagggaacatgcaggtttcacactacaggagcttgtctgtcttggtgcaagtgggaggtaaggctatctggtaagcttaagaatagtttataagggggaagcaggtgtcagactggatattgcaggagaaaagaggctgccaccagggtgacctgtacaggagatggagacatgatttggaatcaattggtggaccattgagaaaggccaacagacaggaaggctttgagtggaaagaatgtacagacccttgcttctttcctcagcattccttgcaggtggtaaccagagaggagctgagtgccaggactggccattggcttggtaaaagttgaaaccttaagaaagcagggtggctcaacttcattagccagcaggaaatgcaaatgaaatctacagtaccacatcaataccatctgacatccatcaggatggctaaaataaaaaagactgacaatgctgtgtgttgtgagacggtggggcagctggtatgctcctagactgctggtgagagtgtaaatgggtagattcagtatctatgaaaaccattttcagtatctacgaaggctgaacctatgtaatatcctatagcctagcaattccgtttttatagtccagtggaaatgtgtacatttctgtactgaaagacatatgcatatagtagcattatttataatggtgaaaaatgcaaacaactcactaatgtttggtgtactgacaaaatgaaacacgcagtagcaataaagaagaatgagcttcaatacatacaatatggatgaatctaaaaaataaaatgttgatcaaagcatccagatacaaaagagtgcatgccatgatttcatttacataaagcttagaatcagagctctggtgttagaagtcagaatggtggttatatttcaggggagaaggtgcctgagatagaacataagtgggcttctagggtcctgcaatgttctaattttttaaattttattacctgactgtgttcactttgtgaaaatccactgcctttatgatttgtgtactttctgtgcatatattatatttcaatagagaattaagataaaaaaatataaggcccaggttggagtctaggattgtgacagggcagtgttgaaattgttgacaagtgcagctaggaaaaaaaggctgagttgtttaatgcatctccgattatattgggtaaagggagctgggggaaattagggacacaacgatggtgacaggagaaagagaatcaccacatggcggactgaacggggagcagcatcttgctgtgacaaagtccaccatgtacctgtcatgggaatgatgatacaatattacatcagctgcatggctatatctaatcctgtttcagaagacgtcagcaaaggccattcgcgtagtgcaacctgggaaggagttggttgtttaaggtggatacagagtagatcctgatagctcacttcttgaccttgtttaatttttgcctgttagttcagcactagaactctgtacaaaaaaatttaaggctgcaatatcattttaatcaaatcatatgcaatgaaaacaaagcttttgctagagttgtgagctcacatatggtttctcctggtttgtggtctcctagggagagaaatgcagcaggttgatgataatgtgaacagctaagttccctgggtggctttaaagggaaagggacaattcactcattttgtgtatttactaaaatcgccttctctctctcagtttctctctccttccctctctctctctcattttctctctccctccctctctcttacacacaagtgggcatgcacgcacgcacacacacacacacacatatacacaaaactagatttgggatccttgttttagtaatgactaatcactatctgggtatcttggttaaaatagaaaggccatttgtctcatgaatcaaaggttaaaaaatgttcttaaaggattaatttccaaaattgctttcaaatagcgtggctgaccagcttttagcagtcatcgttaatgagaatgatggaaaattaaggtcaggtttgcattttctttcttcttattacttccttctcttctaggttgatttgtattcttgcctttccttatatattgcttatcttcccacaaatttcatgaagataatttttaagtaagtttcatttctaatttttccttagttccagagattctgttgaatgtagtcgatgatatgttgttacaacacctctaatgaattataaatagtccattatatagcgcataccaaagagaccttctgattgaacatgcaagttggggccttttaagaacgaaagggggtgctatgaacaccagggcaatggctgtgaaccagcactacttgggcaaactgggatgtatgggtactctacccagaggcctctggggcaggagctggccttgtgaaggctctgtcctgttaggggagctgctttctggcctagccactctggactgagtaaattcacaggtgttcactcagctaggttttctctctgtgataaatcctgcaggggttctctaatttaggactttacagaggcactaattgaaaaaaaatgaaactaatgctaggaatgctcatgataaggcctaattacaaatgacatctgtggatactacatgaaaggttttggatatgatttaccagttctttcttactaagagtctggttaaaaactcatgaatgaatatcactcacagaatgacctcgattcacgtctggtctgatttttttttgtgtgtgcatgttgacttctcatgtgagctttgttcctgcagaccccacacttagtcttatatggtcttcgtcctactctgccttgttctggggtgtggctttcatatgttggggtcttatgaatagaagcagacaagcctcaatctcattaaacacaaggtttttgttggtttttctaaaggcaaggtaaggaagtccctatgacatggaccatggtgcgcatgctcctcgtggcttgtccctgggcctggctcatgaggtttcactcccactcaacccctgtctgcatcccgcctctctctgccttggtgctctggtcagttgactcactgttctgtcctgtgcactctgttcctagctgtgggagttattgggtattgaagaggcttaatgcctgcctcatctttctgtgggttctgaacccatggggaaataaagacgtggaagtcagaagaggatcaaaatgtcctctctgctaatggtaccccttgttctggtggcggtttccctgggctgcccaccattcccctctgtgctgaactcacctcttcagtcacaaacaaagcagcagcacctgccctggtggcttcaaacaaggaggacagaaaaacatctgtgctgtcaggctggtggccagagtggagggagagtggaaaaggggaggaagacaggtaagaagagaaaaaaaaaggcatagaaagcaggagaggagagaggaagacagacagggtgagggagagtggggttcaaacaagcagaacacagaggagagaaggagtgggacagcaagaaactgagagaggctgccagcaccatggctgggttatgggtgtgtaatgaaatatttgaaatattagtccattctcacactgctataaagacatacctgagacagggtattttattaagaaaagaggtttaattggctcatggttctgcgggctgtccaggcttctgcttctggggaggcctcaggaaacttacaatcatagtggaaggcaaggggaagcaggcacatcttcacttggatggagcaggaagaagagagagagaagggggagctggtacacactttcaacaaccaagtcttctgagaagtctatcacgagaactgcaagggggacatcccgcccccatgatgcaatcacattccaccaggcccctcctctaacactggggattacaattcaacatgagatttgggtggggacatagagccaaaccgtatcagaattttctcaaggatcaaataattccctcttctggccctcacggaaaatgaatgaatgctagagcaaaggaaagcactgctttctcaataccaacaggtgttgatggtaattcctgtttcatgcattaaagcaaaatgtggccagagggagaaaagggtccccctaacccccacatcctgccaacctccctgccccagaacacaggtcacgatattcccagtgaaacttaatatcgtgactgccagaatgttactattcagccatttcatgcacagtgccctaggggttgcaatggcattcctagacaactgcaatgcctttctaacattgttgctgaggaatgtgaagccacatcgttgttacctgtaaactgcagaacacaagccttctgtctgcaggaggagggtacgacttttcctattttaaataaagaaaacttatcgttgttattttataaaatgggtaagtttatgagcataatggagatctgttctttgaaatatttgcagcttggacaaaaccagggaattgtagagcatcaaaaacatttcaatgaatcacaataaatctccttctccataatgcttctttcatattcactgtctataagatctgaaaaagaacgctcagtaatgacgtacagaatgtgctttctctggagagggcagggcagaacaggacaggtcagggctggacaggacaggcagctatttcagtccaaggggaagcaggggatcatgttagagtctggggacttagccctggtgattcctccaaaagagtcataggagcacttgagctgtgtccttctgatgggctcagaaaaaattaatttagtattcagtgcttattcttcagattcaaatagtacagaagactataatgacaagcatactgagccagggcatcaggactcccactggaaggcccagagtagccaggtcccagcaggagggagaaacatgaaattgaactgtgagataggacaggagaaatttcagattagtatgactgggcagcttgtggaaactcatattctattaaggagtaggaaagatgacctagtttgggctattaggatgaaaaaaaagaaaagaaaatgttttttcaaagtttccatttggtgtataatttttttttttttttgatatggagtttcgctcttgttgtccacgctggagtgcaatggcgtgatctcagctcactgcaacctccacctcctcctgggttcaagtgattctcctgcctcagtctcctgagtagctgggattacaggcatgcaccaccatgcctggctaattttgtatttttagtagagatggggtttctacatgttggtcaggctggtctcgaactcctgactccaggtgatctgcccacctcgccctcccaaagtgctgagattacaggcatgagccaccatgcctggccgttgtagaaattttattgacaaaaaattcttcttgtaaattgctttttatctcccaacaacaacaaaaaaaaattggttctccaaagagactgtgtatccacccacccggaaggcatgttcaccaggacagagtgatctcaaagattaggatgagtggttggagcttggatttaattttctcctctcttggtctggtgtgacactcacttatttccctttttcaaaagttctagaatctgtttcatttaagagattaaaaaacaagtaactgataaaaaaattcagatattcatgcccttttaatctcttgacttgccaggtaaatctcctggttgaatttcatgtgcatgtttatttcatttgcatgaagtttaaattctcccagggctgtacrgctgcaactatttttgcagattcttcactgcacaagttggctgggctgcagggggtgagtaagtgcagaacggcagccacacttggcttggccaagccatgcagtgtgatgtgagtctgtgccagcccagagggagggatatctttttctctttcacacaaagggctagtaagtggccttgattgccactaaggttcattgacatcatggctaccctgagatgtgcctggtacagtgcttcatgcacattgttatctggtaaatgcttttgatgatggtcctacatatatttcaattcagtgggaacattatatgtgttttacttagggagaacttcaccccaagtgccttatgcttgaaacaatagtggtgttttagcctttgaagacacttggtgtatgatctgactttcttcttctcttgatctttggggcagttatacttgagggtaaataggcctcaaattgcttggtgtcctacaaataaacataaagagcttagcttagatataaaaaccctgagaaatggggaaaaaaagcatgctatctgcacaaacaaggggaaaggcagtaggcaggaacaggatggaagtccatggaagatgctgtgattcctttcctgctcagctcctcaagtcctggttcttgttttgttgaagaacaagcagaaatagtgggatttgggatttagagttctggaaatggccagatttttttttttttttttttgagacagagtcttactctgtcacccaggctggagcataggggcatgatcttggctcactgcaacctctgcctcctgggttaaagcaattctcctgcctcagcctcccgagtagctgggattataggcatgtgccatcatgcacgaataatttttgtatttttagtagagatggggtttcaccatgttggccaggctggtctctaactcctgaactcaggtaacccacccgcctcagcctcccaaaatgctgagattacgggggtgagccaccacgcctggccgaaatggccagattcttagatggcctgaactatgtaagtctgttgtttgatttggttaatctgaggaatacaaagttcaagaaatgttgtaatctcagcgcccttggtacaagagtgcctgctctaagcctttgctgttcagggaaacttgataatttaggtgtgatatatttatctatctattgattcatccatccatctatttatctgtgctatttctttagtaccaaaaaaggcttgcttgcacaggttgggcaggtgttgtaaatgaatgatgcagagagagatttaaaaaaccgtaaggagtggtagggacttgacaaatagagtatttccctatttatagggagtggccactgtcaatcttgggattcttgtcttgcagaaaggcaaacatgcagctttaggggggtccatatcttctgacatttcaaaaggagctggaaatcaagatgtgaaatcagattatttaatattgacaattaattcaaatgtttgtgctaacattgcaagacttctcctcatgttgttgcatgccaagatggagaaaatatgttgggcacgttaggtatttatgtgtcagtttgtgacctctgctctggtatataagtttgcccttagaaatatgttcctgtattattttaaagttgagtgggaagcttctctacttttaatgagttttaaaggagagatgtcatctacttatccctctatcatttggaggataggctagttatgtcacttggattatacaaataaacattgttgtgggttatttaaaaaaaatttattttctgaagcgagtctatcaaggtttttaaaatgtggttcttcatggacttccaaggaggtttaggattggcagtgaaaagaaagagaagaatgggaaggacacttacatttctgcttcttgggatagaggtaatctgtatattttggttttaaaaacagatatttaatcttttaggcacattaatctacatttctaagaagaaataggaaacttcttgatagaaatgccacctgttttaacgactaagcaccaatggcactctgccaagttgaaaacaaatctaggtaaatttaaattgggctggcatttcacagaactggtgcaagcatggttcataaagtttatttttttgcttgagaaaaaaatgacattttactgattctgtgtaagaaaacctttaagtttttatcaaagactattaagatcagaattcaatattttatgatagtatttaatattttacaatgtattaatttacaattaaataagttatttaatacaaataacttaatattttacaatagagttgattatttttctaatgctttcctaaagaaattctgtaaagatccacataattgctagaccagtgataaagcatgtaatttcccctatcttcaatttttccttactgtctaccctctaaagtagttgacaatgatcttctgatagatcctggcttgggtaatacattacactggcagagtaagaattcagaaaatagctcaacaggatccctcagtttggctggtctttctgaaaagacaagtgtgagcagcctgaggagaacctggaactcaggtattctctgtttcaaactcaggaaggcctgggtgaattcctggtagagctggtagaactagctttctattatgaatattgagaagtttgaccaattttatcaggcttctggagtgatatttgcatagttacaacttaatatcacttttctacttaacactcaccagtaacttccacctacttgggccagcccatgtagttcaaggtaaagatcttggattttattccacataaggtaaagatcttgagctacaagatcttgaactactgaagctcttgaattacacgggctggcctctgcctttctctccaacatcatctccagtgacactggccttctttctcttcttcaaatagactaagctctttctcacttcaagctctttgttgaacctgctagtccctgtttctatatggctctttctccagatcattggcttcttttcatttgggtctcaagtcaaatatgaccttcttagagaggtctcctctggtgatgccacttctcctatcacagtatcccatcactctgttttattttcttcatagcccttatttgaacttatcttacttattatttgcctctcattaaaatgtaagccttgtgaaagcagtaccttctctgttgtactttattgctatattttcagaatcaaggacagtatctggcatgaagtgagtgctcaaaagtatttgttagatggacgaattacaatttgcccacattcagtggctttacttgtaatctgtttgactcttgattggtatgtaattttattatatggaagggatggaaagaatagggttcgagggtagtgaggaaatagtaaaagatggtactgttggaattagctacatgatttgagcagcaaattccaagtacggccttaaaacagaaaaagaagcaaatatatactacttgaaagtcagactgtatgataatctaatggtagatatagttatataaatcatacacactcaaagctttacctctataattctgataagaatgggaaggctgatgacatttttgcagaccattaaataaatgtagtgaacttctagtttgctttgagcctatctgcatggctgataaatgcttttccaatagaaagaagggaaaacatgcattcaaggtgataagcaaccggtgataagcacagctagagacagtttttaaaccctgaaactctgtggttactcatataattgtttataagtggctcattgggaaccaaggtaaacagaattaatcttttaaacatcaaacagaaataaaataatatttctttttttttttttttcttgagatggagtcttgttcttcacccagggggctggagtgcagtggcatgatctcagctcactgcaactttcacttcccaggttcaagcgattcttctgcctcagcctcctgagtagctgggactacaaatgcctgccgccatacctggctaatttttgtatttttagtagagatggagttttgccatgttggcccaggctggtctcaaactcctgaccttaggtgatccacccacctcagtctcccaaagtgctgggattacaggcgtgagccactgtgcctagccagaaataaaataatatttcttatctgtaccctaagacatgttggacaggagatgtcccatgaagctgatgaaattttaactaatgcagtaaataatccattgagatttaatcctcatcaatcatcatccttattgttaccatgtggcagaaaaatgtgaaattctgttaaatgcttcatcttgatggaaaaatatgaaatccttgtaaataaagcttgaaattctcaggttcccaaaagatgactcatctgaccttctactcatctttttaagacatgaaacaaaagaaagcaaatgggtttctgtggccaaaagaatttcatcaacaccagtccatgggaacagatcagacatagggaaggtgggtctcatgacactttttggtttatttcacatctcttgagcagagctctcagtataatctcctcaacaagaatgtgtattgcatttctgtaggacataaattgccttctctcctcactattcccagcactgattacaagcttcagcagaaagcagagttttaaattcttgtggaattaataaatagataagagtaaaggtatttagggggagacaaggacatagcctgtaatttaggtgagcaaaatcagtaactgtgagtctgggctgtgacatggtcctggctcactattatttttttacaagttttaggatcttggcgttttatttgctttatcaattactgtggactaagatgtgcgactgtgatgtggattaaacaacaacaatttatttcttgctcatgctgtctgtccattgtgggtcagctgagtgctctgttcattcttgtcactcaggcatgggttgatggagcatccaccatctcaaacgttgttaattaccatgcttgggaagaaaggaaactctaaaggatgttaccccaggtggttaaataagctcatgtagaaatggaatgtgacacttcaactcaaaactcattgaacagaactcagtgtgcctggccccaccaaaaccatccacaagggagggcagaaagtctaattgtgaacagaactaatgatatttacttagtatttgtctgcttgatttttggcacagactgatttattagagtggagaaggtaagctgattatcaaagaatgtcttattttcctcatgtagttaccattgatttattgaatcatgatttcattctttaatatattttgcatcaatgattgattaattttcacagctacatcaagtaactaattattgatttactaatcaattattaaattctacaaattaaataatattacaaactaaattcaatccttgaatgtatccaacatttattgggaaccagtccatgggaacagatcagacatagggaaggtgggtctcatgtgcttgatcatctactatgtgcttgatcactatgctagatactacattgtatggctttgctgaattattgttaagtcttcactcacttagctgagctcagaaatgaatacatctcaatgcatgcagagaaggttcttattgaggcttactcactttgtagggtgttggtggcgtttgagattgtgttttcaaagtgcttagcactggcgatagtgatgttcataatgatgttgcaagttgactaggatttgatagttcatttcctaaaataatttttattcaactaataattcaagtaaacactgctcacttgatgattagtcgtggagtgaagactgcgttgtgaagctcaccattcattctctaacagtggtctcctgagttgggacacttacataggatttatttctgatgataacaagagcacagatgccaaccatgcatgtgatagtttctgggagaagacttgatgattcagcactgtccctataaaatgacaaaagaagacccacatatagcattaggtatggatgaaggtacttaaatttaagcttaattaggtgtaaatccttaactcctatattctactctctggtgctttgaagttggcctcttcggtctccagccacagaagggattttcttcgctgaccacagttccccacgttttcccttcagtaaatagcagatgtgtgtggtggtaagctggttttctgccattgctgtgtgaaaaggcagatattctgaatgaggattgtaagttatttttgtgttacacattcttctttagcttttttcaaaagcaattgcattttagttgaatgtgaaaatttactcttgatgattttctcagattaatgctgtcatcatgttaatggggtaatgcttccttctgcaaagatcttggaatttagggcttctggtcagtgttttacagctttgtctgagaaagaatgtaatatgagtatgtttttggtacatgacttcaaaaagccaagtctgctttgcctgatttttgtgtgagcaatcccacctgtctgatctcacccctgctcccaggtcacagatagaggagaccttgtgccctagcaacaaatcacatccactttagctctatggggacatttcaacaacaaggttcttgttgyggcttacccactttgtagggtattggcggtgttcgagattgtgttttcaaagtgcttagcactggcacagtgctgcaacttgcagcataattatgaaataccttaacaaaaggtatttacaaaagcatgagaggatgaatgtgaggaaggagcatgtcatgttgggtaagaaaatatggcactagaaacatgggagaaggrgtgtgttttgtgggggtagatggataagaaagagaacagytggatcagacaccaatttaccaaatgattccataatattagtgcacagataatgcacagatagtgtgcaacaacagctttgggaaaggcaaactgactgtctataaaggtcagaagacattttataagatgtgttttactgaaagtgttgtccttgtgaagaggttttgagcaaatattttaagaagtctttagggaacaagcaattttcctttttgttgccctttctaagaataagacataaataggaagttccatccttttatttgttctattcaaatatttataggggaaaatcggctactacttctttataagacccacctttgaaactcattatttttccaaggtgccttgttcttataacaatattttcttctatgtttgtttatttatttattttattgagatggggtctcactctgacacctaggctggagtgcagtggtgcgatcccagctcactgtagcctctacctccggggctcaagtgatcctcccacctcagcttcctgagtagctgggatcacaggcttgtgccaccatgcccggccaattttttgtgtttttggtggagatggggttttgtcatgttgcccaggctggtctcgaactcctgaactctagcaatcagccctccttggcctctcaaagtgctgggaytacaggcgtgagccacagtgccctgcctataacaatataacaatattctgtttaggctatggaagaccacatatattcttacttaagcacttagaatggaagccacctgaagacagaggttatatcttcacccttgtcacccacacataataagtgcccaattgatgtcttttgattaattaaatgaattaattagtgaatgaagacagacctaggactcctgatagaaaaagaataaaaacttgcttctgtttgtccttctacagtgaaaagatttcctaaatatcacatataataccagcacacatatcttgtttgctagtgatttgatttcatttatgtctgttatttaaattcagggaaaaacataggtagttttttcttgtaatatctcaacactgaacttgaatgaaaccttattaaataatgcgcaaaattaactattatattttgctgctaaggggctttggcattttgctttggtaaattatgtcgctggtctggaagactcaggccctgggatgacaggcctatgtcacaatgggtgacatgggttgggaaagatggctggctgtcctgtaaagtgccttatgagtgtgaagccaaaggcagtgcttggtaccacccagggaatatctatcagaatgagatattttattggcttcacataccataccataacatgtctgatacagtcagccaaaacaagattatttatcaatgcctctgccagctacccaagatggttaagagaaccaaaagccaaatgcagtgatcaaaaagactgctgaagaagtaaaaggcaaaaggatgaagaaaaaccagccaggaacccatgttttgcttctatctcattccctgggaatcagcagtgtatgagcatctatctctatataatccgtcttctctgcaggcagaagggctactcccttactgcacctgagtcctcacattctcaaccacatcagtcactaggaagcggtcaagggaacaccacagtatagcagagtggtcaaatctgcaggctctgttgccagactgcctgggttccccttccttttctatcacttattaccttgatagttactaaaccctcagtgccacagggttttgatctataaaatagagaaagtaataaaaatgttatctcatagggttgtagtgaagattaaatgagatactgtgtacttactatgtattgtatggcttttgttaataaaggcagggtcaggacaactgcatatatgtggtaagtggagatgtgaaatatgtataactggccacctaagttcagtatttgaggatgtatgagaaacgctagttgaataaaaacatattattattacttgtgttgttaccattactactgatgttattaccaagcagatgttaaaaatatttctatatgcactatggatcctacttcacttatgaggagaataatataacccaaagcttttaattctcattgcttcagtctttcaaatgtttttgttctcaactttactgagaggtagcagaagccaaaagatagaaatctagtaaaaattccaagtagaaagacataaaagtttagtctttgaaatgcagttggtctggcataaaaaataaaaatcaggctctagtcccaggataagataattttttaatgagttgaaattgtagctaatagaaagttgaatatacagataaatgaattgaaagaaggcatggcatggtttattcataacagatgttaaaagagtaagagtgattttttttttacaaagacaactcagaaaataagccagagagtttaaaagtgaattcactgcacagcttggttctgcattcataaatacaatgaagctcaaaaaattatttagtagcagaggcttatgagaagagcttggttctgtggagcagcaacatgataaagttagatttttggggcctcacctaacctgtgggacagctctcgggcctctgatttcaattattccctgcttttttttttttggtattgctgcaacacatctgtctcctggtaccctctccttgccctttctgtctgctttccactgggattgaaatgcttttctttcctccacctctgtttctagttgcagtatttttctttatcaagctcattttttccctaacctgtaaaaacatcaccagtgaatttatgacattggagctagtagctgtgttgatggacgtgagtgtccagttccatagctgcatgccagatgaatagcagtaatagagctacagaggccctgccagcacagccagacatgatgcactaacatgccagtttccttgcttctggtgcttccaagccatggggcccctggtgatatataccgttaatcaaacaagtgtgatgaaagctaaatgaagcaaatttagtgtgtggcatcaatatcaacatcatttatttactcactcattttggttcacttgaatattcagtactatttttccaatagtaaatgatgagaaaataactttttaaagtggggggaaaagaaggaaaactagtaaatttctcaaaagaaataaattagaagaaggttgaagccatgtcaaatggcttcaattcagacatttttaatcataggtagatattggtgtagccagagaaaaacacagtattcataaaaattatcattcagatgtgaatatgctgatagtaatattactatctggatttctccagattcataaattatataaaaataacaactgcagcccaaggcagtctatttaaatgcgtgaggagtaaggcaaatggtattcggagaaaagcattgacaacttggttaggtaaaatgctacattttcatcttgataataaaatgttcaaggtaattattggggctgttcaataagcagagccagtgagaacataataatcactctgttttgtcagtgagaacactgttaatattaatgggaatgtaatgctgaagttcctggggattgataaaagggcagctctagatktgtgagactgacacgcggctctgggggttcctgaccagttaattatggaccccctgcagtttttttcactctcttgggagcattcccaggacccctcctgaggcatttcttactaaatgtgagagagaacttattttcaaattcctctgaattgagaaccagactagatgtagggataaagtgaagtacagttgatctttgaycagcacaagtctggaatgtgtgggtctgcttatacttggattttcttctggctctgctacccctgagacagtaagaccaaccccttctcttcttcttcctcctgagcctactcaatgcaaagatgatgaggatgaagaccttttgaatgatatggttccacttaatatatagtaaatatattttcttttccttatgattttcttaataacattttctttcctctagcttactttattgtaagaatacagtatataatatatatataatatacaaaatacgtgttaattggctgtttatagtattgctcaacagtagcctattagtagttaagttttttgggagtcaaaagttatactcaaatttttgactacacgtgggttaatgcccccaacccccaccttgttcaagggtcagctgtagtagattaaaaggtttttcatgtctggaaagattctctattcctggactggttcaaggaacttagaggtcaatctgaattccaaggagtgaaggtactaatggtttgatatccaggtgtacatggccctctgccaggagactgtagggaaagtagattatcatcatccaacttgtccagttgtgcagccagatattcttgctgacaatgtgaatatttacctatgaatactagagtactagtctaatgtgcaacaagatacatttgcaaagtgcagggaaagtataatagtcaggtgaccaaaggtcacagtgaccttccttaggtttggtctcctgactattacaccttgacttgtttttactttttacaggatttttacagtgcagtagtggcacataatttcttgatcttgtgtgtttctgttacggtaaaaataaaaacaaatataaacagtaacaaagaaacagcttccaggaaacttattagttattcctcctatgttacatggcatttccataattctcatctgtattaagtttgctgtgggaatggcaatcatagtatatagcccttaccaccagcactgccttctcacatgatttattgcaaattggttatattggagagtggattctgccaaatgggtagcctaattagtagtcaaattgttgttttctctagtgatttattatcaagcgtattaatttcagtgtccaacagaatgaaataaatgtcttggactattttttcaatgacattaaaaaatgaaaactaacccagagaccaattacattgaaaaaaatttatttgagccagaaaaacgtccragtactgggcaacatcccagactaaaaatggttcagaatgccccaacctccaattgtggtgacttagatttataaccagaaaacaggaaataacatatagagattaccttgttggtgcaattcaatgtttgccttatgtgggcataatttggcagctttcagcctgggaattgactgaggatttggctgctatgattggcggagaaacagttgcttggtaacaagggtatactcctagattacagcttgctatgtatggagactgctttgagccaaactttactaccaagtaaagaatctgctgtgtgccaaacttaactttaacacatctcagcattggtctgaaaatcagttcacagtatttgatagtgtgccttgccattttctgttacacactttgttccctgtatgaacttctgtttactttgcactatttctgtatctgctactttggaataaaagtagtcagtataacttaaataatgtttcttaaatagtcaaatgagagtgatgattcaaatatacctcctttcccccattttctttctaaattattcacctctaaggtaattataactaagtttcaaggtttgatttggaacatttttcatatttctgtcacttagttcatagatgttcatatttctactgtattatcttatcagttattaagattcttgggagagtatatatctttttataaagctttccagaatagttaccatgatgttcattcttataagtaagcattcatgcagtagctgcttaaatatgatcccgtgaatggtggtataaaaaacatagtggattagacactatgtgctctaggagatggaaattgaagaccctggcccagtgaatttctcagcaaatgttattggccgcctggtcaatatatagtgttgtatgcatataaagtatttggcacatacttattaatatattaatatgacacattaaaagtaaactattctgtgatatatgttatggattatctctcaacatccattccaatttcttactagtgtacccctggccctgtgaaagctggaaccatctcttagtcttccctggagataaggtactgaatccatgaaagtgctagtctgttgggggaattctgctcaccagaacccttgtgaagcatcctttagttgacatgagttcagaggtactgatttatgagatttagtaggtggaaggaaagcagagactaacttctgctatttcatctaccatgcagagggttatggggatatcttgttgctttgctttcagcactggcacaagtccagggcccatttgctagcagtgtgggtgttaagaggcaggatgtaaggtatcacctgtgctggtgaggaacacagtgaggagtgtatgatttgggagctgagagcagtagcagtggggtcagcagcttcctgattgggtggtcccaggatcaaagtggttagtgatccgctggcttccttgctggtgtttgctttctaactgtggcaaagcactgtggttatggaactggcagtgacccaaggtggcaggtagcttcctgatcccagaagaggcagcagttcctccagcagcccatttctgtggtgttgcttgggaactatttctgaaggctcaacttagatgtattcagccctccccagtgattctctaagccatttaattatatgtcttaaatgtttttcttcttaaaatagctacagtagattctgttatctttagttgagccataatcaatatcccattggaacacatgcttcctacatattgtttcaatgtcaagtcattgagcattatgttatttcatggayatttgtgggagtaccactagaaataatcacaaatataattataattgtgtctttttcaaatccatcacagaatatttacacgtactccatattttccctctaatcaatgagttacactggtgatatccccaggcccattaattttccttataaaatatcccttgaactgtactttgaagcccaacaaaattgagttgtttgagctataaaagcaagagcaggcagaaatgcagaatctccacaggaaatgttttgccttcagggtcctgtcattcaaactagagattgaaaataccaatattctagctaatgtctaaggctgcttatttctatggctgaaggcacagggccaattagaggccaaagcagtgggtcctatcaccaggtaagccatttagttttactctcttttgtggcctcagctttcgctcttggtcttacctcatcatactacctgcttttgagcagagagaaagtgtagaaaagtggcagaaaatactttctcaaaattctttagtaatgatgggtcaggagcatcatcttctagaaggactgtgcatcctagtcagtctccagagagaagagagaaatgcaaactgtccagtaactgtgagccatgctaagctgaatagacaggcaaaaaggaggctcactactgtgccttgggaggaaatttgtattatcagggagaatggtatgtattggttaaggtggaggtgtgatmgaaacattttgagtatataggagaatttagttcacaataggagtttaaaaagataaaaaaggccaagtactgtggctcatacctgtaatcccagcactttggaaggccaaagcggagggttgacttgaggccaggagtttgaaaccaacctggacaacacagagagaccacatgtctacagaaaaaaaaaaaaaagccgggtgtggtggtggcacgcctgtagtcctagctactcaggaggctgaggtgggaggatcgcttgaccccaagagttcaaggctgtagtgagctgtgatcatgccactgcactctagcctgggtgatggaatgagaccctgtctctaaaaataaataaataaataaataaataaataaataaataaataaataaaataattaggtggaagaaagatgacccagcaaagtgagagactattcattgcttcataattatattcagctataataatactgattcctttccaaatagtgaattaaatacagacatacgtgtttattatgttaaaagaagtctgaaagtaggcagtttggggctggcatggcaattctgcaaggtcatcatggacccaatttccttcttgttctgttatccattttctaagcacatggctcacattctcaagatcaactcatgatccaagatagctgctaaagaactagatatcatctctgatttccagccagcagaaaagggagaagtactctccttccccagaggcccatgcaatatttcctcttacatctctttggccagaattttgtcacatggcctcactaagctgcaagggagcctgtaaatttaggctatttggccaagcagaaatatacctagcaaaaaaatgggattctgttatgaaaggagaagaagatgagtggatatttagtgggcaactctaatctctgccataaagtaggtgatctctgtcataagactgagctagacggggattatactatgctgttgttgactgtggccttttggctctgtgctgaggctttcttttctagggccacaaacggagtttctcacatttacttctggatgatccaggaaactaaactggttttcagagaatactgccaaaaatgcctgagcacatgctcagctctgtgagatcagcaacggcacctgagacctttttatctgcttgttgtagtttttaatccactgaaacaatagcaggtgtaagctggaattctttggcacacagcctctgaaccttggctcatgttctcagataaatgcctatagcagctgaagctcttgaaaaaaatttaagaggaggaaacagagtagggatctttttggggtcacagtctaggtgtttttagagccactcaaactcgaatcaagaccctttgattaccataaaaaatctaaaataagatgttttgtttggcccaaacagttttagaaaaaagtgagccaaatctgaaaattagtttatttcatatatattgaatagttaggccatttggccacacctgtcctgcatcctgcgtgttgacaacatcctgggactgagcaatagttgtcatccttaggtggggcctgcatttgctggcccccaaccatcgacgcatttctgatatcttgtgtttggcctacttttcactcattgaatgtaacctgctgaatacctgtaagcatctaggctgtgaccctttctgtggatggctcaggaggtaaccagtgcatgagaagtttctggcctacctcagttgctatcagggtgggcagagtatgtggagaactcctagcctggagagatgagaaaggatgtaggttaaagttgaggtcctagaagaaaagatcttgacaaggaaagcctgaaggcttgtccagtatgaggttgccaggagtcatctgtgggaagacacggaagtgcacctaggagcagctggtgtctcaagactgactgataggctcgaacctgagccatggtttacaaagctgacaccaggatgtaactatgggttgtagccaagttgttccaacacaggtggagtgaactcctgtggtattttgaagtgataattggctagggtaatattttcagggtgctggttctaacagatggtgctatttgaaatccttccctataatctccatgaatgactctgtaacctacttaggaggcttattcaagtggttcaaaacctaggcctgtattccaactggttggcaatctgttcattgatgttgttatctgaattcatgaagtgggcattacattgttttaaacaagaagtatacacaattgcttcccaatccactctcctctcaaaacatgtactgatacatgcatgtatatttttgccacccttaaaaattcactttgtaattactttaatgttaatgtagaaaagagacacgaaaacctcaaaaagatttaggatttaggatttacttacctgctatataaaaaaaatcagggtctatcagctctgttggaaagaatggcttgagaaaactctgctttcatcatttgaaacttttattttgggattgtgtttataaatttcagaaagagtcctcttaccttcttccagcccaagtaagtgattggattgacgtttgtattcatggactttggcttgaaatgaaatcttttaattctgccttagatagtaaatgccaacagtttaaagtggcatgattcgatctttaaatttgccctactgatgaatggtgcaaataggaaaaaggaaaataaaaagtatttgctaccttgagaaatacactcagtctctatttgattttccttagatgtgggggtctgtaattgtaagatctgtttttattcatcgtaactaggaaagcctcaacattttaattaacaatagtaatataaattacattagttttatttcagttagaatttttttctttcatgtatttaatacgaaaatatccatgcaagagttccttcagcttaagtcagatgtgttcagtggctggggcagtgcattaactatagtctgcatgtgagaaaaacagcaattggcttttcactagtatttgtcattgctctatcctaatgcattcaacattttcctattgtgctatgctccactgtatatcacattttacctatttgattccaaatttactttgtggtattaggttttaatttagtaatttacatacagcttggaaaagtgattccttgaagatattgctttgtatctacatgataattgacactatttgtattaatattaaaagcattaacctctttttcctagtggtccccaatttcattcttagcaaaataaaattacagattctgttttcaaagaaaatttgtatatgggatttctttccattccttatctaatgttaggatactgaagttaaagtatgcattttctgtttttatatattttgtctttaaaatatatgttcagttataaaagtaatatcaattccttaaataatttttgtaatatacaggcaagccgcaaaaaaagaacaaatattctagagttccatgaaagtcatcatattaaaaatgaaattttaagcagttggacttcacattatttcataagaattttcaactctaatgtatatataatgattctaccaagtgtgtcatagttcacttagctgtttcaaatatttttttctactaagactaattaatactgtgtggaatacttttatatatagaccatttccatacttgagttttttttaaaatttgagttctcagaggtagatttactggttcaagagacattttttaaacttaatattagtttgcagggagcaatccataaatccatgtttcctaatactctgcctggatttttttttctgtgtttggagcatcagatgagaagttgtgaggagaaacaatggaaaaagaagaaggaatcatagaatcattgctgagtgttgctccccaggttcttgtttgctaactgaaaggaatttgctggctgaagggaagacatgttgaacacttttattcaccctatattcaccctgaattctctccccatggccaagggacagtatcaagacttctgttgtttcactgagacaagtcaaattaagaaacacttgagtgtttattgtgtcctttgtagggcttatgggcatatacctcagcaaagtaggcgggcaataatttaggtcatgcccatttaatttcaaaggccagctttaatcttttgggctgattgtgattactccaaaaacggcagaaaacaactgagaagggaataccaggtccaggttacagttctatggaggttttgtgtaatcctgagttttcgctttgcaatttggcaccatgatagcttttgtattttctttcctctgttctactttttcccatcatggcaggtgaacttctcagtgtgcaaggaattatatgtagctgactcttccagggtatgagaggtgggctgaagctatcgggatagcagctggcttcagtagtgcttttagctgtctagacttgtgctttctcattgattttggtgtctgggcatgtcctttactttctaaatcatgtctgcatttaaatattttagaatattttatccagcattttttgttgtttttccccaaaactagtattttcaatatttctgtgagagaacagggagtcctttctagtatattgctggaaataaaatatgcaacctattctctacacaacagtcagggtgatcttttaaagtatactttagatcatgtcagtcccctacttaagaccttccacagcttttcattgctcttagattaaaagcaaaaccctttatgttttctacaaatgtctgcatgatctggctcctaagaatcttctttcttacccactctttctcctgctccttaacttccagccacactggccctctctgttttttgaactaatggagctcattcctgcttggggcctttgcacttgacattctttctgcccatgtcctggacacactggctcttatgcatcattcagttcacagcttaagtgtcctcctcagaaggacctaccctgtccaccctactgaaaatagcaaatttgctatcacccaatcattctaacccatcaccctgtttaattgtctgccttaaattgttttgtttgtctatttgttcacatgtttacaattcagaatataagctctgtaggagcaggaaactcttctctctagttcatcacttcaagcccattactaagaacaatgcattgtttgtggaatgaattaatgatttaaataattagcctatatagtgtcatttccaaagttggcagaatatcatcattggaattttgttcttaaggggaactgggttatagaaatgtgggaagaatacttaattagcattgaaaaacaatgctttactaaggaatcaaaatcatgaaatgtaagagcaaataggagtgtttatcccctttattccagactctattttatagatataaaaaccgagactctgggttgctgtgagtggctcagaccccacaattagtggcagagctgaggccaggggatgcacattctgattcctgcatcatggctgttgcttaatatctcaccatgagtcatggctactgcccagtagattgggcacaaccatgaatattagactggcaatttgctagagattttgcaaaaccatgggaaatggattgaacaaattttcctgtcatttttgtaagaggcagtaaataatggtaatttgagtattagagaacagcatctgaatactttttctaaaattctacaaggtgaacatagaaaattgtagctttcctttctgcctattgctttctgaatgtcaacagattgctttcttcagcttatgttagaatgtcaccagcaggacccacatctgacatgctctggactgtcagagccactcagcactaggagaactttccagttgaatttctcttaagaaggtcagtaggaataagataaacgaaaaacttattcatcattaccataatccttgtgaaagtggaaaagttcatcctggcaaattcaaaatcgattacaaactcatgcatgttgcatatgtatttttaaagatttttacaaacccaaataaaataagtagaagaaaacagtagtgataaatttaaagttcttaactgaatgagtagctttgaattttactcaacggatataagctttggttttttttataaaaaagaaaacaggtttgttaagagactatgaacatattttagaaatgcttcagtgattttatcatttaaatagaaatttggattattctggaaaacagtttgataatatgtttcaggcatttgaacatatttactctcctggcccagtaattgcagttttagaaatttatcctattttaggaatctagcctagagaaaaatctgaaattcagtcatcttggcataaggatggttgcagaaatactattaataataaaaagttgaatagtacctaatattcaagtagaggtataaataatttgtggcaggttcatttgctatagttttatgcaactatttaacaaatataagtaagattatttaaatgatgaaggaaaactctttcaatataatgttaattttttttttttttttggagagggaagagctcttttatttagtaattcctgacacattttagatgctcatcaaatagttaattttcttttcattgcttcttacttttctctccctttatttatttatttatttatttattattatactttacgttctagggtacatgtgcacaacatgcaggtttgttacatatgtatacatgtgccatgttggtgtgctgcacccattaactcgtcatttacattaggtatatctcctaatgttttccctctcccccttcccccaccccacgacaggccccagtgtgtgatgttccccttcctgtgtccaagtgttctcattgttcaattcccacctatgagtgagaatatgtggtgtttggttttttgttcttgcgatagtttgctgagaatgatggtttccagcttcatccatgtccctagaaaggacatgaactcacccttttttataatataatgttaattttttagagagtaagacctaaaactatatatacgtgtatgtaatacgtatatagtataatctcaactacataaaaaaagacaaaaaattaaaagattgcaaaaaaagtcaaagtattaataaatattatctctaggatttgaataattattgctattttctcctttatactcttcgtattttcactttttccacaatatgtctattattttaataatcagaaaatcaatataatttattttaaatcttggcagatgaacatagtgaatgaactatgtcaaaatgcggttggaattttgttgaacttctttacagaagactatatagatgagtgtttttctaaaaaatctttggatagataataagatcaattaaaattgagtaaattcatctgtttgcgtgtgtgtgtttaaactatttatctcttgtgtgctacttagctcctgtattgctttcgtaataagactgaggtagttggtgaaaatttgaacaattcttgcataaagattttattgcataggttataggataaaatgcaagagaaatgttttgtggaaagagtacttagtagagaatcagaaaggctttatgggtccttcattttggtcactgttatacctttgtctaatagaccattgatataactttctactctataagagattgatacctagttaaggaaggtcatgatatattcactttgttacaggaaatttaaggtgcccagaaaaaaaaaatcaagaaccaaaactaacgaatagagagctctattgttattgactgaagtataaacttagatcccttagcaaagcgaaactcacagtccatacaaaaccccttgctatgtccgttggagaaggattggcagcaagatagcaagtatgtggaggatcattgttcatgaagcaggggtagataggagccttttcatatacttctaaccttttttattgtctaacctattgttatgttgtctcattaagaagaggcaatataatgtagtggccaagaggtatgacttaagaatcactggactcaaaatttgccagtttataactctgtaatcctggacaaactactcccaattttctaatttggaaaatgtggatgataatggtccaaaaaaaaaaaaaagatgagtcatcttaagtatttgaaccagagagaatttaattggctatgcagctgagggaagagctgaaaagccaaatggggtcattaaacaacccgaatattagcaatagcaggaagcatccactaattctaatttgaagggacaatatgttggagacagtgttactgggtccacagactgaggtcactggaattatggtgtaactggaggaggcatgggagaaagctttttgatggtagagattctgctcaaggcacrgagagaggagagaaatatcttggtgttcccatctttcgaccctccagtcttgtagccaaacacagccagaagtcaactgacaagggactctgcattgcctctctttaatacagagcagagaaggagaaaggtgaagaatggatgtgtgacaggcaacaattcctacctcagaggtattatgcctaaagcatttagaacagtgcctggaagatatgtgcttaatagacactaccattatcatcgtcatcatcatcatcattgttatcatcattggtgccatttgcagagtagcaacatctctttgtgaatgtactttacaggttggatgctatgagattgtttctaattacagcccttttccgggccctgctgtggtcaggttgctagtcatttcagcatttttagtgtttggtgaggcaggggtgttccaccttccattctcatctaccctgcgttgattacatttagagtcagcagacctagttcattgatgacaagaactgagccacgcaatgttctaaagaatccaggcagttttaggagcatgataaaaattcacaaccctgtgggaaatgacccttggaagttaactttaaaattaatgattttaaaattaggatttccttacatatcctagtccctttagagttgagcttagctttgtcctgcaaaactgaaagaatacatatttaatttttttggtattttctgtagcatggcattaaaattaataaatttaaaggaatagaagcttgacaagatgccttaataggcccaccaggaataatcacatagttgcctattttgaagcatagacataaaattaaaaaattccatccagataagtcacgaggctttgccaaagtgccctcttaaattgctccccttttgagaatgcactatttattgtagcattttgctgagcccttgggaatttctcttctgagagacttttaccagtatgaaaaatagcagcttttctaagttttggaatattgtcagtcttttttttttcattggttttccgattatcctattctcagaaataacatttattgatctcaaggagttaaacattgtcttgttttctctggttctgtattcttcacctttaagaccagatcccaactaagtaataataaaagataataatggctaagagtttttgagctttcctccacgtcagttattgttcccagcactttggtttcattctctcatttgatgtgatataggaacttgtaacaaccctatgagacaggtgcttcactttaaagactaagatactgacgcagaggttataaacctcccccacggtcacaaaatcatgctgctggactgagctcgcaccttccactactattaatacatggtaatgttgacatcttattgtaaatgttaaacaataaagcgtaaagggaaagaagtaaatgcaaaaaaatggtcaaagcaggagatgattttaaagagcatctggttcagtctccccttttacagctgagaaaaccaatctctagaaaaaagaaatgagccttttgattataaagcagactgcctaacaagtatcaagtcatctcacttattcttctctgtcttccatgatcacagagttctgaccatgtcctgtgtcactctcaagcagagattgaaaatgacattcgtcctttacttgttccaaggaagcaaacattttatagtttgaaactgtttctcttgcatttgctttgcaagaggtttgcagaagttaagcctcatggagtcttctctccttaacttaagtgagtggattgcttattgctcttctttgcctgtaaattcatgttgattagacagtggtggggtggagggctgatgggtctgtgtttggttggcaagctaactccagcatcctataattactacattttcaatctggtgcatagttctgagttttgtacatccttatgtggctctacactctttgaggttaattttggccttggatggtgcccttttaaaggcagggtaatagcaacacagtgtttttgcttgggaaacgctctgtgtatgggcttcttctcttggttttaagtattaacaaggtagtaagtatgaaaggtgctgtgtttggagtctttaaatggacttggcatttggcttgtctacaatctttcaggaattttaatcctgatattcagatttgagtcacacacctggggagtggtgaccatagctcttccttacccctccagctccacttctgggttagcatgaactgaccactgtaacctgctctcaggctctacacaaaggtgcttcagaatctgcctgtggccacttctgtgaaagggcatggtcacagtcaccgtggcatggatagaaaactggagagcagcaggaggagcccagggatagagagaggaggcctggatgcctgcctgggctctgtgccatgccttgggtaggccacttgactactttaaaccaagttgactctcctgtaatgcaataggggtttaatgatctctgtggctctagagttttgtagtttctactgttctttgaagcatgaacattaattcaacagaagaaaaaaaaaccaaacatttttcattcagaacagtttcaagatattgctctgactcactggatggcaaatcatagtgaaagggaagtctgactcgacttccattttgcattacttttggccagcatggctctttatggtgtacttgttgtataataaaacagctytctagagaatactcttacatttacttactgagagataacagaagttccgaataaaaactcatagaaatggaagactrggaaattatttttttcttttttctattacatacagaggaacaaaggctgatatttgtgtttatgcccctttctgaggacaatgtccttgaaaatccatattattattatttgtctttatatgtaattggattgtttaaactcttctctgaactttgtagctttttcattatatctcttttgctggaatattaataaaactccacttaaatagccactttattctgtaaattttatttaaggcctgaacttggccgcaaatgagagtacttgtggtttttttttttttttttttaaatgatgtgactgctttgtgaagggacataatgagtctgtgttctcttctattcctcttcaacaactttgtcaggaaagaaggctattatgatttcttggagatgtgggaggattgtggcatcaccatgtcctagtcatggatgaaagyagaaactattataccagggtaacatctgaggcctgagataaaattcccattacaatctctttaaatatttctgtgtttaaatgggatgagaagactatccactccacaaargtaatcccttttcttcctcagcctagtgaaacttattgtttcttttccctagataaaaaaaaaaaaaataggatgctgtacagkttcttttggcttgttaaaagacagataattcacagattttgcttttctgtagcttatgcaatgtctgaaaaggcgctgtaagcagggattccctgaacatrgcgccgtgggcccggatccctgttttgctttcttcagagagctcactggcagcctccctgatgctttgtgccagtttttaggcgctccaaagccacatgcacattgacataatctccggtggttttggctggtttataatctggcttattgaggtttggttcaaggcagaggcctttagggcagggatcttctgtgagctgaaataaaagggtctggtttggaggagatttgactctgccaaataaaagcggcacatttccaactgcacatgctgagttgcctcggaacacatccatgcagaacacagacatgcattaggcagctagtttgtggaaggcagtgtgctgagcacaagggggaatagaaagacacatggctgccgtgaaataactgcttccagaaagcacatgtcgagttggaaggatgagccagaagacacacagagaatattactcagcctaaaatgtgacgtcccgaaagcgtgctagtatgagacccacagagttggagaagagattttctttccagtggggaaaatccaggttagaaagaccagacaggccatattaccggaggcaccctttatttcaagtttggctttttgtggtttcggttacctgcagtcaaccgtgtccyaaaatattgagtggaacatttaagagatacacaattcgtaagttttaatttgcattctgttctgagtagtgtgatgaaatttcatgccatcctgcctggggtgtgtagcatccctttgtccagcatgtccatgctgtccatgtgactcgcctggaggtcccttagtagccgtctcattagcagatccaccttcgaggtatggaagtgcttgtgttcaaggaactcttagtttacttaataatggcccaaagtgcaggagtggggatgctggcaatttgaatatccctaaagtgcttcctttaagctaaaaggtgaaagtttgaacctaataaggaaaaaaacaaaaattatatgctgaggttgccaaggtttatgctaaaaatgaatcttctatccatgaagatgtgaagagggaaaaagaaattcatgccagttttgctgttgcaccttgatctgcaaaggttatggccacagtgtgcaataagtgcttagctaagataaaaaaggcattgaatttgtgggcggaagacataaacagaaatgtgttctgattgaccgcaattaggtttggtactatcagtgcagtttcaggcctacactgggggtcctggaacatatgccctgcagataatgggggactgtcgtatagagcccctggatactaatggtgctagggattcaggcccctctcctattttgggaaggggcaacctcagcatataatttttgttctttccttattaggttcaaactttcaccttttagcttaaaggaagcactttagggatattcaaattgccagcatccccactcctgcactttgggccattattaagtaaactaagagttccttgaacacaagcacttccatacctcgaaggtggatctgccaaagagacggctactaagggacctccgggcgagtcacatggacatgtcgtgtgtatggaaccttggaaagaggctgtccttacctccctgtgcattctggcagcccctggcactgctcatagatagccatgtgactcaggctgggactctgactctagagcgaatgggttaaaggtcaagaggctgttagaacttattgttggtgtcagtggtggcgcccattggctttcagtggcggcggcagcagcagtgtcctggctgtaattcttgctacaggatagtggtcgtgattcttgctccttggcatcttgcgcgcctgggtttttgctcattttctgtccttagtgatgaagacttctactgagtctgaacctgcatgtccttccaatggagtctacttttttctcctccagctagccaaggccggtttctgttatggcaagcaagaattcccacagcacctgagtgtcaacggctttcatcgtttgtgctgacccacctgtgcagctgatcgtctgccttttttctccggctactcaccttcctttatctacctatataactccctgctttgaaggctgaactccagcatttttaacttttcctgagttattgaagagactttactgtttactattcctctgtacagtacaacatcttataattgcccattatacagattttttttacattgtatgtctttttttttattattatttgtttctgtttgcctactagcccatgaggaatgttttttggtaggaactctattttcatctttatagttccagatccagctaagattacactctggttgcgtgactgaacaaatctgtttgcagggagagatgtggtgttggaattgtgaacctatggagaatgaaaaaaatagaatagctgttgtgaggcatttactctggtgatactaagggaggaataaaatggtgtctgaaatgtgtgagggccgtctgataccgagtagtgtacatttattttccacttaaaaaagtctggtttatttaggtattatttatttacagtaaaatccatcccttttattgtagagttctataagttttgacagatgcatatagtcatgtgtataccaccagaattaatgtatagaacagtttgatcacctcccctcaaaagctctccctccttcttatagccagtgtctccccacatcttcagctcctggaaacaactgatctatgaattgatatgtgtgtrtgtgtgtgtgtgtgtgtgtatatatatatatatatatatatatatatatatatatagtttgtttgtttgttttttgagacaaagtctctctctgttgcccaggcttgagtgcagcagcacaatctcagcttactacaacctctaccccccgggttcaagtgattctcctgcctcagcctcccaagtagctacgattataggtgcctgccaccatgcccagctaaattttttttttttttttttgtattttcagtagagacagggttcaccatgtcrgccaggctggtctcaaactcctgacctcaggtgatccaccggccttggcatcccaaagtgctgagattacaagcataagccaccacatccagcctatcaatttatattttaagcagttatcatagttctacaactttccagaataatgttttatacaccaggaagataaaataattggatagtggatttttgtctaggaatagagttgctgaaattaggaaattaaaataacatgtatttatactaaaaattatccattacttatataaaattcagtgtaattgggcatcctgtattttatctggcaacccaacccaaccccactggatgggtattgccagtgtgggaactgttagaattgagggtaagtgtgaaattggcagacagagaaggaaactgcaagaagagascatggatcctatcaacagaatcattcagccattcagacactttgtgacaacctaaaaagagaggagggagtgagatttttgtatgaagtaagaattcacttgtttgtacatgaacagcatatgctagcctgctttgaagactgaagttcttggctttccagtttataaaccagttctatctgggcagcttgcagccaaattgtgttgtggaggaatgggactcaggaagcacgggcaccctgaaataggtggatgtggtctgtggaaaaggtggaagcacacactagggttctacccttaagaaaatgaacctttgctgagttatcaaagtgagtacttgctatttctcaggatagccatgccacaaacacatatttacagtaaaattcaagttggtaacaattaaaatgactgacctctagtttatctatatattattggaacaaaagggcttactgagcaatgccaaggaaagaaacttccaagtgggttcttcttactctacataaaagaataaactattttaaaagacttttggcaagtccactgtttatactaccataagtcttacctttctgttttaaagcaagcttggcaggacagttacttggaaataagttgtcagtgtttggtcggagtggtagcagttgtgtctggaattcttcattcttttcctcgctctccaataacctaccctgtgaggctgtctccaaccccagagccctgaccaagtgaccatgctgctaagctgcttgataatagtttaatatcagtaaagggacacaagtttaaaattatttgacatattagtgctatcagttaatgacttaaaaatagcatctttggtttctaggtgttgacaaagattctctaacttaccaaactttagccatgctcctctgaacccccttcttgactaggccttaacttcctatcacaactacagattctcaacaccaatgatttcatccactcgtgccccacattaaaagacttacacaaacactagaataatttctaacagctcaaggccacatccctaggactaccctaccccacttaggatgcctgcctgaggaagctcaaggttgccaggagagtttactatttcttctagccaacaccctggagctaggcccaaccaccctttcttagagcatttactaaaaagggcttacaattgtgaatccttgccctgtaacctttgataaatatatgcacttcctactgctcaagagtgtctttctcaaggacccaagagccattcttctaaaaagtaaccatcaggagagagagggcctctgtcttttggtatctgggcagatagaatcctaactcccataattgtctaatcaactttaatgttgaccaaccctttgtaatttttcactctctgacttcactgagcctgctctcaccccttcccttttctactctctcattcctcttctgaaatacacagtctcctctgtgcaaatcaaggttgagttcagttcacactgcactcccttccctattgcaatagcgtattagtggttcaaatctgtcctccccactttaactagtgtctggcttcctttatctctgacagtgtgaagaatttggaaattgcaaggagcatgggaaggagatgatttggggtaggcatcttttattttttaaatcacattgcatacaggtggctgtctcttctgctcatactcctagaacaggcctttggtgtattttgctatatataggagactgggactagaaggtcaccctgttcagctgttttcagactatcattaggttgtaaatggaatccattaaaaaattatatggaatgcacaaaataaagcaggtgaaggcaaaattactcttatggaaacaggggtaggaaatctagaatcgtatttattccttcttttctctttatacttatttggggagtcttagcctcattaagaacaactgggagggtaaaacacaagtttacaagaaaactagtttcctccctttcagagttctttccatcctggcagctgaatggactcagcagctctcgggggcagtggcttgagtgtgctgggcttgtgtctcctaaataggaaatactacccacaatgggataaaggacccacagggactctataactggggayttagaggacacatcttgtgtaattctggcagaagggctaggcatgaagtcagagcaggagatgactcagaaatcctgatgcttagagacattaccctgtggctactgggatcactgcgatgaactttgcctgaggtctgtaatgtgatttacaataattattctattcccttactcactagcttgacaagatgaacaagttaatgttattagcttctcaaattggaagatgataattattaggtgggtccattgggagtcaggctggggtgagttgttatcaaatcagaaggagttatcagtagggcactagtaatcaataatgattgaatgtgggctaccagaatttgccttttcatgatgtatacaggacttgtttacataaccaygtcttcaagaagataaaattaggaagacatccagataacagaaatgtggagagaccttgatatcatattatgattgagaaagaaaaaacacatagacattgacattgggaaggaatgactacatccagttatggcagcaaagctgtgtgttgattgatattgtgagaatgaatcagtgattgggcactgtggctaggacagaaagggtgaccctgagagccacagtgcttttgtgtgtgacagccatgaagaaagcttatctggacttgatattgacccgttgtgtatttccgtattttttctctcttttctctccttttcctccactctttccctcttctctttcaacctcatgttgaaaaaaaacctgaagtttgcttgtggaaatgggtgagatttgtgagttatgatgaattggaattatttgcaatcaaatggaaagttgtaacaacaggtgtggatggatgcagctcacacataatgcatgtggtgaattgaggaagctggtagaagtttggggcgtgattgacaggtttaaatgtagcagaaatagagtagttgcttttggcattttagatttttaaataatactttgmtcaggccacacattagttagtcagacacagagttggaaccatatttggaaccttcggagcctccacgtgggcttgttcatcgtccttatgttagggtgacaaggttcggagctaaaaccagagagagaaagccacagcagaagcctcttccagacccactgtgtcagttttgaactgaggcattttctgtccacagccatatgcagtgtgaacaggccacagatgtacatcaagtgagtgggtgaaataacgtttggtgggaaatgatgacagttttatggcattagtccttgaagccccaggtgcacttattcatctttaatatattttaagctgttagccttggggatatttcagcctgtttgcayctgtattttaaagatgagccctggagtgaatcagtgaggggagcgagtcatacctgaactaggagaagagatgaatgaatctttgtaggagaagagttaagtggatctagttatccctgaacaaggagaatatatcagggtaatgaagagacctagaggaaggtcatcgtttccttttaaccagccagctggttgaccttcctgcacctgccttagagccaaccttggcctgggcagcttgcaccaagctttgcatatgccccttggatgtcaggatgctatacctggattatcctggcacagagcatgaattataattcctgatctcagcatattctaccctttgacttctrtgttagggattttgactcttctgcttctgacttttcgatgaatcatgtctccttgacagagagaaggctcttttttttaaaatgactcatagccatatctatatataaccactgagtgataaataactcatagccatagctacatatggccactgaattgagtgattaataattctgttgttataaatttgagtgaatatattttggtcaattatgtggttgtggctataaagatagctaataatctttattagaatttggatactgttgatttttttcttgtaattttataacttccatttccctgtggtacatatgcagtgtggaatactatgcagacataaaaacaataaaatcatgtcctttgtagcagcatggatgcagctggaacccattatcataaatgaattaatgtgaaaaacagaaaaccaaatrtcccatcttttcacttattagtggtagctgcttataagtaactggacacacacagacataaagatggaaacaatagatactggggactccgaaaacagagagggaggggggcaagggctaaacaacttcctkttggatactatgttcactatctggacaacaggatcaatagaagcccaaaccttagcatcatgcagtgtatccctgtaacaaacctgcatatgtactcgctgaatctaaactttaaatttaaattryaaaaaaaattcaatgtttggacttaggcttaaatttctagaactttttccacctctaagttgtcattatacaaagtatgtttaatagtagctggaagagttatttaaatccacacactaacagcaaccacagtgaatacggtttaggtaatattttcttttatccaacagctagagtgagatgcacagaacaatgaacaagcacctcaagaccttggacttgttagagattcagagtgagtttcaaagcaagaaaaggcaggaacatgagtagcattcctataaaatagctactgaagcagagtagctaaggaaagatgattgttgtagaaacacaatcagtgaaatagtctggtagaaagactattccttaaaattcttatactcccatagaatttacttctaaaccatactgcccttagacttgagcaaraatattccctgcccagcccygcatttcagaggatcctaattaaaccctcctcttgccttccccttccccacagggtgagcattctgtaagtccaagtaatcatatcccctaaccctcccatgtaagccatggtctgggtatctggactctagaatttcctgccagggtagtccaaaaccaagacacaggtctatccttcagggggaagtttgcsttccacacaaagggaggccaaggggcagggaatgtgaatgaatgagaaaccatggcgtccatacataagtttgcaaatctcagtgaaagaataagttggcatgaagagaaggaggggtaggagagagcctgggggccagcttcttctgaataagtaaattctggtgcagggcttttcttaggtgcgttgcatatgttacctcatttaatcctgcagaacacttcagggtagtgttctactgtcacattatgggacagggaaatgaggctcaggggagttaagtaacagacccaaggcaactgacttggtaagaagttgagctgagattaaaccttaggtgattgagctctaaagtgcatgtatttttctaccttgttatgctgcctgtgatcagtatctttgcttttataatttcccagttctttccagaacctagcctggtccttgcacttggtgacatgcaataaatatttgctgagtaactaacaaaacagaccatttattcacctttactagttatttattatttatgtatttattcacctttactattaatggtatatacaatacaacagtggtgtaggtgaggaatttcatgtcaaatatactgaaagggacagttcactcctgatccatctgtactggatggatgtgttgatctccctgtggccatgtagcttttgggcttatctctccatttgtcagtttagtaaattgctgcaaatgttctggctagcaaggactcaaatgtcccagaacaaacttttgctcaaagaaaatattaataaacaccatatatgcttctgtagtccaaaatgtttttcttttcttacttaaaaatggcacaaactctgagtattaaggtgattcaagaagttgtgagaatgcctgtttctcaggagttgattggcagggtccctctgttggtgcggccctgcttgtctgggctgtagttcttccatgtgtgtgggccacccatgctggctcctggaktggtcagtgtgctgtcctggggcttggtctttccctccgctcacccccacttatcatggatgccaagaccattctctgctgttggcagaaagccatggaacatacttccctaattcctgctataggctcatttggtattttccccatgtgctcccatttgtacacttaattgtttgggcttatttgtctgtcttccttgctaaactgtaggctcatttgcgcacaggctttgtgtctctcttgtttaccattatatcatcacatctaacacaatgcctggtacatagaatacttaatgaatttttacagaatgacaatggactgccatcataattgagtcattaactactttttcaaaaaagttctagcattaaggtatcagatcaaagtttcctttcacaaaaatcttacattttcctctatactgtaattgtatctacctgcttggagactcaccaagagtgtagtcactgtgtaccctcccagagtgactttttttatctcatttagaactatttgttactgtgattctcttaagcaaatggttttgcccacgcagagctgtttgctcactgacacaggcttaactggttaaagaactcacaggttgtttctcaccattaatggctattatgttattttaccatcagttatacctcatttctgcttctatctttacaactgcaggctttggtcatttttaaagtcgttcaagtttagattgcattgacattaaatcaaatcatagaggacaaacaactatatattttcaccgagagtgggcacagtaaagagttcccaggctttctctccgacttttagataggtctttttcagaagcttcctatctccctaagaagtctgagagttattacaatttctttaccctttgcttacatatcccatcacatagaaaaccatttaatagaatctattgtagcagaggcagaactttacctctgctctcatagagtcccaggtagaactgatggtgaaattgacataaggtagattaataggtayattagtccattctcatgctgctaataaagacatacctgagactgggtaatgtataaaggaaagaggtttaattgactcacagttctgaaggtctgaggaggactcaggaaacctacaatcatggtggaaggggaagcaaacatgtccttctttacatggtggcagcaaggagaagtgctgagcgaagcaggggaagtgccctttgtaaaaccatcagatctcatgagaactcactcaccattataagaactgcatggaagtaaccccccacccatgattcaatgacctcctactgggtccctctcatgacacatggggattatgggaactacagtttaagatgagatttgggtggggacaccactaaaccacattaataggataaaagcatgtaagttttacataacacaggagccctcataaggaaatgaagacccaaacaagtggccaaacctaaatgcttttatacttggttgaacaaagagagacgactgtgaaaaagtaactaaattatgtgggaagactaaaggaagatcaataagaattattttaacaaggtctgtgtgtacagaattctcttagttgtgactccccatcaaagaatgtttcttttctcctggcagaaagacagcaactttcacatgtgagattttatctcctgttttcagggaaaaaagggaaaagattagggtgcgctttttgcatctgctgttattcaagtgcccttagttcaaactaatccttataccaaaatggcatattctggggtacatattctgccattcttcactactaaataacagaacatatgcttacctatgtactagctatttcatttctggtatgtgccaaacagaaacatatatgcatgagcccaaaaaaatctacaaaatctttataccagcattatttgtaataatccaaatggaaaacagtccaagtttccatcaacagaagaatgcatacctaaactgccatatagcaaatatatagtgaaatattatacagcaatgaaaatgaaacagtagttttactgctataggcaacaatatagatgaatataataaacataatgttgactaaatcaattaaaaaagagtacatactgaatgacttgattccatttgtataaagttcaaaaattggtcagataatattgccatttgggagataataactgggatcctgtctttttcccttggagagctagaagaatggactcttctcagaaaggtgaccaaaacttcataaaatctcctttccccagaacattattatttacttacctaggtgctgccaaccacaccccattgtgtccctttagtcattgtatggaaggaggtcaaatgccttagtctcccagtgactagagctagatatccagccatatgaacagtttgttaaaaccaggactctgaattctaatgcccaataaggagggttgtacttttgtgaaaataggctggtgacaattatctgaggtcagaggaaagattctgtcatcatcattgtcatgatcataattcttattttggtttctttactcatgtttttaaaaattatatttgtagaagctattatgttaggtttaatagaaatgtagaaaaaacataaaaatcatttgctcagtgtgatgaattttcatatactgaatatatccatgtaacttccacataaatgtttgcgatactcatctatattgttgcctgtaacagtaaaactactgtttcattttcattgctgtataatatttcactatatgtttgctatatggcagtttaggtatgcattcttctgttgatggaaacttggactgttttccatttggactattacaaataatgctggtagaaacatttttgtagatttgttttggctcgcacatacacgtttctgtttggcatataccagaaattaaatagctggtacataggtaagcatatgttctgttatttaatattgaaggatggcagaatatgcaccccagaatatgccattttggtataaggattagtttgaactaagggcacttgaataacagcagatgcaaaaagggcagtctaatcattttctttttcttccccctgaaaacaggagataaaaactcacatgtgaaagttgctctcctactaccaagagaaaagaaacattctttgacaaggagtcatagccagaagaatcctgtacacacagaccttgttaaaatattcttattgatcttcctttagtcttcacacgtaatttagttacttttccacaattgcctctctttgttcaaccaagtataacagcatttaggtttggccacttgtttgggtcttcatttccttatgagggctcctgtgtcatgtaaaagttatgtgcttttctcctattaatctatcttatgtcaatttcattatcaggtctacctgggactctaagagagcagaggtgaaattttgcctctgctacagtaggttctattaaacggttttctatggcatgggatatgtaagcaggggataaagaaattgtaataactctcagacttcttagggagttaggaagcttctgaaaaagacctatctaaaagtaggagagaaagcctgggaactttttactgtgtctacctcagtgaaaatacatagttgtttgtcctctataatttgatttaatgtcaatgcaatctaaacttgaacgactttaaaaatgaccgaagcctgcagttctaaagatagaagcagaagtaaggtataactgatggtaaaacaatataatatctgttaatagtgagaaacaatctgtgagttctttaaccagttaaacctgtgtcagtgagcgaatagctctgtgtgggcaaaaccatttgcttaagagaatcacagtaacaaatagtagttctaaatgagataaaaagtcataagaaacattatgtacctgatggaatgtttcaggtgaaattgggtcactcgactggttgttcatccttacttaattcttaaaattttctgatggcctaagagtgaaagtttctgaatttagctgatcatattttaggaaaaacacaggacaaaatttaagttgctgaattaaagtgtctagtgttatccctgatttttaggcaagtccttatacttatcttttacctttaaaggagagtcagagatacctagcagaatggttaaataaaaagtaatgacaagagcaaatgcttgcaaggttgtggagaaactgggccactcatacatggataatgggaatgtaaaatagtacaggcactctggaaaagagtttggcagtttcttaaaaaactaaacatgtaagtactacactatccagtaaatgcactcctgggcatttatcccagagaaataaagacttctgtgttcacagaaaaacctgtatgtaagtgtttatagcagtcttatttataatcgcctaaaactggaagcaacacagatgtccttcagtgggtgaatgattaaacaaactgtggtacatctacaccacggaatactactcagcaataaaagaaacaaactactgatacatacaatgatctagatgaatcttgagagaattatgctgaatggaaaaagccaatccccaagggttgcatactatatgattcaaattatataacattgttgaaatgacaaaattatgaaatggaaaacagattagtgtagattagtagttgctagggattaagaagggaaggaataggaggaaactgggtgtggctattagaggggcaacatgggagatcctgctgataatggaactgttttatatcttgaccatatcaatgtcaatatattggttgtgatattattaccatgggggaaaactgggtaaaagatacactgattttgtattattttttataactgcatgtgaatctacaattatctcaaaataaaaaaataaaaaataaagtacaagagagtcagggaaagttctatgtagtttctcttagatcagtttttattttttaaacagttacccatccgtttcttaaatcttatggattgttattaaaggaaggccactgcctctgctttccattaaggacaatatcaatcatcaaagacatctacaaagtttctgaaattcttcatgcagactttcaggggaccattagatcatattattttacctgtagggatatatacaatcaggcacaaatcttagatctttaagaagcagtatagctgaactgctgcttaaataagtgggaggttggttgaggttattttccccctataattgcttttcttctgtcccagaagaacctgtcagaccagtcattaagctattgtttagttctcatttggcttaggtggttcagggatcagcttagggaataatagaggcaatgtaatgaatcttagtgggaataaagtgattgagaattttggtttgtttttaaggcttagaatataatatccattctctagttccatgactgccccaatgcaattctttttgaaatgctgtaacttatagcctggggagcctcaccatgttcttttagttttttcctcttctatgtcattgtgcacaggatcttccagcttttgggttaccatgtctttgagttttctagtctgaataagatctctttagaaatcatatttttctgagagctatagttgactatactttgttttctgttgtttcataggattatctcacaaatcctacggtgaaaccatatgaggttcacagtaaccatatgaggcgtaggtattatcacctccattttatacagacttaaggaagctaagtaatttgtccctggtcatgtatgtgacagaaccagaatttgagttcagaaagctaacttcacagtctacacagttagcctctctttatttttgtttttgtctttgttttgagacggagtctcgctctgtcatccatgctggagtgcagtggcaccatctttgctcactgcaacctctgcttcctgggttcaagtgattctcccgcctcagcctccctgatagctgggactacaggtgcacagtaccatgcctggagttagcctctctttatacaatacagcatctttgagttrggattgacagttctgttctttcaagagacactttttgagacctgtcatcttttaggcactgtgctgggtcctatggataaaaaactactgaacatgattcctgtaacagagatgctcctagtttattataaggacagatgttaggtgcagtgtgaaaaataaaatgttagacaaacaatctcttacagtctcgaaaatattcaaattcagactattttagagacagcacatccctgagaacaaaatagtaaatagtcaatttattcatttgttcattcacccaacaaaaattcttttgagtgtttgcaatatgttgggtgctaagctaagtcttggagatagagtggtaaaggaaacagatgaggtcctgcccttatagagcttatttaccttttagtgaggcatttacttaatcaaacgttcatagaaataaacagaaaattggagctgacaagcaccgtcaaagacagacacatggtgctaccagaggaaattaatgagagagttagttcttgttggggccatattacctcagagggaatagctcagaagtaaataggcattaactaggtaaagaatgggagcagggggcagaggagacaaaaccctgtagcagatcagggcactgaaattccgagaactgaaagaatgccagagagacctcaggagagagaggctgcgggtggggggtggagggtggtaatcatgctaattgaagcccaagagacatccagaggccagacaaagcaaggctttggggtggtagtaaggatatttaatcccaagaacaaaggaaagtcactgaaaataactgagtgacaaagtcatatttgttatttagacagctctttttagcttggcacataagtattggtgagaagccaaggtatgctggggaaagaccagcagagaattgctgaagttacaaggccagatatgatagagctttggctagagctgtggtataaggatggagggaagtggaggggtatcagatgtagttgggaggtaagggaagaaatcagtgatagattaaacaaaagccaggggaacaaaagagtaaggttgatactaagtttatctgacagttggtggtaycatttactgggatagggacattggaagcagatcagatttggaaggcagattttgaattcaattttggatatgtttggtttagggtgactttgagagggagaaaagaaacatcaagtagacacttaagtctgtgtctggagcctagagtggaggtccacactggagatacacccgtgtgtatcataagtgtacaggtggtacatgacatcatggccatagatgccactgcctagagatacacaaaagagtgagaagaaaggagagtctggaaccaagctttaaggaacttaatctcacatctatgtgaacgaagatcaacctacagaggagatggaagaatatcacaaagataggtagagttacaaaaatgaaaggatgatatattttgataaagatcggatggtcagcaatataaaatgctgctcaaataacaggtttaaaccagttctttggagttattgacatggaagtcattggcaactttagcgaaagctattttatgaggaaaaaggtagactggagtgaagagtgagtgaggactggaaaattggatgcaatgagaacagagagacaaaacttataagaagagaagaacaggacatgtaggatttggggaagactttctagataagatggaagagacttgagtatgcttaaaagccattggtaaagacttaattgacagggctctgacagctatttcagagagaaaataggtaacgggtagtgttagctcatgagaaggggaataagcagaaagggatttgcggaagtgcccttaattgcatggttggtatgagaaagataagagaattcacctactgggaattatatcttcctgtaaggttggagacagtattattggctgaaggtgaggggacaagaaagagaggtaaaggtgtgaaaagagctgaaaaagtttgaaatatgttagggttttgtgtgtgtgtgtgtgtgtgtgtgtgtgtgtgtgtgtgtgtgtgtgtgtatgtgtgtccatatatattcaatgtttagctcccacttgtgagaacatgcagcatttggttttctgttcctacatttgttcacttagcataatggcctccagcttcaaccatgttgctgcaaaggacatgatctcattttttatggctgcatagtattccatggtgtatatatagcacattttctttatgcagtccaccactgatggacatttaggttgagtccatgtctttgctattgtgaatagtgctgtgatgaacatatgcatacatgtgtctttatggtagaattatttatattcctttgggtataaacccaataatggggttgctgggttaaatggtagttctgacttaatttctcggagaaattaccaaactgctttccacaatggctgaactaaattacattctcacaagcagtgtgtaagcgttcccttttatctgcaaccttgccagcaaattaaaaaaaaaaacagtattttttgactttttaatcatagccattctgactggtgtgagatagtatcttattgtggttttgatttgcattggcctaatgattactgatgttgaacatttttacatatttgttggttgtgtgtatgtcttcttctgaaaaatgtctgttcatgtcctttgctcactttgtgatggggctgttttttgcttgttaatttgtataagttccttatagatgctggatattagacctttgtcagatgcatagtttgcaaatattttctcccattctgcaggttgtctgtttagtatattgatagtttcttttgctgtgcaaaagctcattagtttaattagataccatttgtcaatgttttatttttgttgcaattgcttttggcatctttgtcatgaaatctttgccaagaccaaagtccagaatggtattttgttggttatcttccagcatttgtatagttttaggttttacatttaaggctttaattcatcttgggttaattgttgtatatgatataaaaaagaggtccagcatcaatctgcatttggctagttagttatcctagcaccatttattgaacagggaatcctttccccattgcttgtctttgttgactttgtcaaagatcagatgattttacgtgggtggtattatttctgggctctctagtctgttccattggtctatatgtctgtttttgtacctgtatcatgctgttttggttactgttgacttgtatagtttgaagtcagataatacgatgcctctagctttattcatttgctgaggattaccttagctattcaggctcttttttggttccatatgaattttaaaatgggtttttcaaattttttggaaaatgtcattggtagtttgacaggaatggcattgaatccgtaaattgctttgggcaatatgaccgttttaacaacattgattcttcctacacatgatggttgaattttttttattggattgtgttatttckgatttctttgagcattgttttgtaattctcattgtagagatttttcacctccctggttagctgtattcctaagtattttatttattttgtggctattgtaggattgtgttcttgatttggttctcagcttggatgttattggtgcatagaaatgctaccgatttttgaatattgattttgtatactgaaactttgctgaagttgtttatcagatctaggaggttttgggcagagactatggggttttctaggtataaaatcatactgactggtggagccaagatggctgaataggaacagctccagtctaaagctcccagcgtgagygatgcagaagatgggtgatttctgcatttccaacagaggtaccaggttcatctcactggggagtgtcggaaagtgggtgcaggacagtgggtgcagtgcaccgagtgtgagccaaagcagggcgaggcatcacctcacccaggaagcataaggggtcagggaattccctttcctagtcaaagaaaggggtgacagacggcatccggaaaatcaggtcactcccaccgtaatactgcacttttccaacagtcttagcaaatggcacaccaggagattatatcccgtgcatggctcagagggtcctatgcccacggagccttgctcattgccagcacagcagtctgagttcaaactgcaaggcggcagcaaggctgggggaggggctcccgccattgcccaggcttgagtaggtaaacaaagcggctgggaagctcgaactgggtggagcccactacagctcaaggaggcctgcctgcctctgtagactacacctctgggggcagggcatagccaaacaaaaggcagcagaatcctctgcagacttaaatgtccctgtctgacagctttgaagagagtagtggttctcccagcacgcagctggagatctgagaacggacagactgcctccgcaactgggtccctgacccccagtagcctaactgggaggtaccccccagtaggggcagactgacacctcacacggctgggtactcctcttagacaaaacttccagaggaacgatcaggcagcaacatttgctgctcaccaatatccactgttctgcagcctctgctgctgatacccagggaaacagggtctggagtggacctccagcaaactccaacagacctgaagctgagggtcctaactgttagaaggaaaactaacaaacagaaaggacatccacaccaaaacctcatgtgtacgtcaccatcatcaaagaccaaaggtagataaaaccacaaagatagggaaaaaacagagcagaaaaactggaaactaaaaatcagagcacctctccttctccaaaggaacgcagctcctcatcagcaacggaacaaagctggatggagaatgactttgacgagttgagagaagaaggcttcagacaatcaaactactctgagctaaaggaggaagttcgaagccatggcaaagaagttaaaaaccttgaaaaacgataagacgaatggctaactagaataaccaatgcagagaagtccttaaaggacctgatggaggtgaaaaccaaggcatgagaactacgtgaccaatgcacaagcctcagtagccgatttgatcaactggaagaaagggtatcagtgatggaagatcaaatgaatgaaatgaagtgagaagagaagtttagagaaaaaagaataaacagaaacaaacaaagcctccaagaagtatgggactatgtgaaaagaccaaatctatgtctgattggtgtacctgaaagtgatggggagaatggaatcaagttggaaaacactctgcagggtattatccaggagaacttccccaatttagcaaggcaggccaacattcaaattcaggaaatacagaaaatgctacaaagatactcctcaagaagtgcaactccaagacacataattgtcagattcaccaaagttgaaatgaaggaaaaaatgttaagggcagccagagaggaaggtcgggttacccacaaagggaagcccatcagactaacagcagatctcttggcagaaactctacaagccagaagagagtgggggccaatattcaacattcttaaagaaaagaattttcaacccagaatttcatatccagccaaactaagcttcataagtgaaggagaaataaaatcctttacagacaagcaaatgctgagagattttgtcaccaccagggctgccctaaaagagctcctgaaggaagcactaaacatggaaaggaaaaaccagtaccagccactgcaaaaacatgccaaattgtaaagaccatcaaggctaggaagaaactgcatcaactaacaagcaaaatcaccagctaacatcataatgacaggatcaaattcacacataacaatattaaccttaaatgtaaatgggctaactgcttcaattaaaagacacagactggcaaactggataaagagtcaagacccatcagtgtgctatattcaggaaacccatctcacgtgcagagacacacataggctcaaaataaagggatggaggaagatctaccaagcaaatggaaagcaaaaaaaggcaggggttgcaatcctagtctctgataaaacagactttaaaccaacaaagatcaaaagagacaaagaagcccattacataatggtaaagggatcaattcaacaggaagagctaactatcctaaatatatatgcacctaatacaggagtacccagattcataaagcaagtccttagagacctagaaagagacttagacgcccatacaataatgggagactttaacaccccactgtcaacattagacagatcaacgagacagaaagttaacaaggatgtccaggaattgaactcagctctgcaccaagcagacctaatagacatctacagaactctccaccccaaatctacagaatatacatcttctcagtaccacaccgcacttattccaaaattgaccacatatttggaagtaaagctctccttagcaaatgtaaaagaacagaaattataacaaactgtctttcagaccacagtgcaatcaaatcagaactcaggattaagaaactcactcaaaactgcacaactacatggaaactgagcaacctgctcctgaatgactaatgggtacataatgaaatgaaggcagaaataaagatgttctttgaaaccaatgagaacaaagacacaacataccagaatctctgggatacattcaatgcagtgtgtagagggcaatttatagcactaaatgcccacaagagaaagcaggaaagatctaaaatggacaccctaacatcacaattaaaagaactagagaagcaagagcaaacacattcaaaagctagcagaaggcaagaaataactaagatcagaacagaactgaaggaaataaagacacaaaaaacccttcaaaaaatcaatgaatccaagagctggttttttgaaaagatcaacaaaattgatagaccactagtaagactaataaagaagaaaagagagaagaatcaaatagatgcaataaaaaataataaaagggatatcaccactgattccacagaaatacaaactaccattagagaatactataaacacctctatgcaaataaactagaaaatctagaagaaatggatcaagtcctggacaaatacaccctcccaagactaaaccaggaagaagttgaatctctgaatagaccaaaaacagactctgaaattgaggcaataattaatagcttagcaaccaaaaaaagtccaggaccagatggattcacagctgaattctaccagaggtacaaggaggagctggtaccattccttctgaaactgttccaatcaatagaaaagagggaatccttcctaactcattttctgaggccagcatcattctgataccaaagcctggcagagacacaacaaaaaaagagaattttagaccaatatccctaatgaacatcaatgcaaaaatcctcaataaaatattggcaaaccgaatccagcagcacatcaaaagcttatccaccatgatcaagtctgcttcatccctgggatgcaaggctggttcaacayacgcaaatcagtaaacataatccagcatataaacagaaccaatgacaaaaaccatatgattatctcaatagatgcagaaaaggcctttgacaaaattcaacagcccttcatgctaaaaactctcaataaattaggtattgatgggacgtatctcaaaataataagagctatctatgacaaacccacagccaatatcatactgaatgggcaaaaactggaagcattccctttgaaaactggcacaagacagagggatgccctctctcaccactcctactcaacatagtgttagaagttctggccaggacaatcaggcaggagaaagaaataaagggtattcaattaggaaaacaggaaatcaaattgtctttgtttccagatgacatgattgtatatctagaaaaccccatcgtctcagcccaaaatctccttaagctgatargcaacttcagcaaagtctcaggatacaaaatcaatgtgcaaaaatcacaagcattcttatacaccaataacagacaaacagagagccaaatcatgagtgaactcccattcacaattgcttcaaagagaataaaatctaggaatccaacatacaagggacgtgaaggacctcttcaaggagaactacaaaccactgcttaatgaaataaaagaggatacaaacaaatagaagaacattccataatcatgggtaggaagaatcagtatcatgaaaatggccatactgcccaaggtaatttatcgattcaatgccatccccatcaagctaccaatgactttcttcaaagaattggaaaaaactactttaaagttcatatggaaccaaaaaagagcccacattgccaagtcaatcctaagccaacagaagaaagctggaagcatcacgctacctgacttcaaactatactacaaggctacagtcaccaaaacagcatggtactggtaccaaaacagagatatagaccaatggaacagaacagagacctcagaaataatgctgcatatctacaaccatctgatctttgacaaacctgacaaaaacaaggaatggggaaaggattccctatttaataaatggcactgggaaaactggctagccatatgtagaaagctgaaactggatcccttccttgcaccttatactaaaattaattcaaggtggattaaagacttaaatgttagacctaaaaccataaaaaccccagaagaaaacctaggcaataccattcaggacataggcatggacaaggacttcatgtctaaaacaccaaaagcaatggcaacaaaagccaaaattgacaaatgggatctagttaaactaaagagcttctgcacagcaaaagaaactaccatcagagtcaacaggcaacctacagaatgggagaaaatttttgccatctactcatctgacaaagggctaatatccagaatctacaatgaactcaaacaaatttactagaaaaaaacaaacaaccccatcaacaaataggcgaaggatatgaacagacatttctcaaaagaagacatttatgcagccaaaagacacatgaaaaaatgctcatcatcactagccatcagagaaatgcaaatcaaaaccacaatgagataccatctcacaccagttagaatggtgatcatgaaaaagtcaggaaacaacaggtgctggagaggatgtggagaaataggaccacttttacactgttgttgggattgtaaactggttcaaccattgtggaagacagtgtggtgattcctcagggatctagaactagaaataccttttgacccagccttcccttactgggtatatacccaaaggattataaatcatgctgctataaagacacatgcacacgtatgtttattgaggcactattcacaatagcaaagacttggaaccaagccaaatgtccaacaatgatagactggattaagaaaatgtggcacatatacaccatggaattctatgcagccataagaaatgatgagttcatgtcctttgtagggacatggatgaagctggaaaccatcattctcagcaaactatcacaaagacaaaaacccaaacaccgcatgttgtcactcataggtgggaactgaacaatgagaacacatggacacaggaagggaaacatcacacactggggcctgttgtggggtgggggtgtgggggagggatagcattaggagatatacctaatgttaaatgatgagttaatggatgcagcataccaacatggcacatgtatacacatgtaaccaacctgcatgttgtgcacatgtaccctaaaacttaaagtataataataataaaaaataaaataaaatcatactgtccgccgggtgcagtggctcactcctgtaatcccagcactttgggaggctaaggtgggtgaattgcctgatctcaggagttcgagaccagcctgggcaacatggtgaaaccccgtctctactaaaatacaaaaaatcagttgggcatggcagcatgttcctgtaatcccagctactcgggaggctgagacaggagaattacttgaactcaggagatggaggttgcagtgagctgagatcgtgcaactgcattccagcctgggtgacagagcaagactccatctcaaaaaaaaaaaaaatcatactgtctgcatacagatagtttgacttcctctgttcttatttggatgccttttatttttttctcttgcctgttgttctggctaggagttcgagtattgtgttgaatagagtagtagtgatatttggcatccttgtcttgtgctggctctcaaggggaatgcttctagcttttacctattcagtatgatgttggctgtgggtttgttatagatggttgttattttgaagtttgttcctttaatgcctagtttgctgaaggtttttaaaatgaagtgatgcttaattttattgaaagctttttcctcatctatcaaggtgatcatgtagtttctgtttttagttctgtttatgtgatgaatcacatttgttgatttgtgtatgttgaactaactttgtatcccagggataaagtctacttaatcatgctgaattagctttttgatgtcctgttcgatccaggacatagtttgctagtattttgttgaggatttttccacctatgctcatcaaggatattggcctgatgttttctttccttcttctgtttcttccaggttttggtatcagaatgatgctggcctcataaaatgagttagggaggagtccctcctagtcagtttttttgaatagtttcagatagaattgtaccagtcagctctttgtatgtctggtagaatatgcctgtgaatctttctagtcctgggctttttctggttggtaggtgttttattactgattcagcttcagaacttgtcattggtctgttcaggatttgaatttcttcctagttcaatcttgggaggttgtatgtttccaggaatttaccctgaaaaattctaggttttctagtttgtatgcataaaggtgttcattatagtctctgagggttttttgtatttctgttgggtcgatggtaatatcccctttaccatttctgattttgtttatttggatcatctctctttttttttctttgtttgtctagctagtggtgtatcaattttatttattctttcaaaaaaccaactcctggattcattgatytttcaattttttttgttttgcatttcaatttcattcaattctgttctgattttggttatttcctttcctctgctagcttttgggttggtttgctctttttctgtttcctctaggtgtgatgttatgttgttaaattaaaatcttcctaactttttgatgtgagcatttagcactataaactttcctcttaacactgctttaatattgataagatagagattctggtatcttgtatctttgttctcattcatttcaaataatttcttgatttctgccttaatttcaatgtttacccaaaagtcattcaggagcaggttgcttatttttcatgtaattgtatggttttgggtgatttccttagtactgatgaaatggtttggctctgtgttcccacccaaatcttgccttgagttgtaattgtcataatccccacgtcaagggtgggaccaggtggaggttattggatcatggaggtggtttcccccatgtggttcttgtgatagtgagttctcatgagatctgatggttttataagcatctggcatttctcctgcttgcactcactccatcctgccgccttgtgaagaaggtgcctgcctttcctttgctttctgccatgattgtaagtttcctgaggcctcctaggagtgcagaactgtgagtcaatgaaactttcttcctttataaattacccagtctcagatatttcttcatagctgtgtgagaataaactaatactactgatttctattttcattaagctgtggtctgaaagtgtggttggtatgatttccgtttttttgaacttgctaagaattgttttatgacacattgtgtggttgattctagagtatgtaccatgtgcagatgagaataatgtatattctgttatttttggttggagagttctgtagatgtctgttaggccaattaggtgaagtgttaagttcaggtctcgaatatatctatgttagttttctgcctcagtgatccatctgatactgtgaatagggtgttgaagtctcccactattattatgtggttatctaaatctctttgtaggtctctaagaacttgttttatgaatctgggtgctcctgtgttgggtgcatatatatttaggatagttaggtcttcatgttgaattgaaccctttaccattatgtaatgcccttgtctttttgatcattgtcagtttacagtcaattttgtctgaaattataatacaaacccatgccttgcttggtataattttcttcattcctttactttgagcctatgagtgtcactgcatgtgagatgggtctcttgaagatagcatacagttaggtcttgtttcttcattcaacttgccactctgtgtcttttaattgggacatttagcccatttacactcaaggttaacattgacatgtgtggagttgattctgtcatcatgttgttagctggttattatgcagacttgattgtggagttgctttatagtatcagtgatctatgtacttaagtgtgttttcatggtggtgggtaatgttcttttcttttcatatttggtacttccttatggacttcttgtaatgcaggtctggtggtaatgaattcccttagcatttgcttcrctgaaaagattatacttctcctttgtttatgaaacttaatttagccagatatgaaattcttggttggaatttcttttctttaagaatgttgaatataggcctctggcctcgtctggcttgtagggtttctgctgaaaggcctgctgttagcctgatggaatttcctttgaaggtgacttgccagccgggcgcggtggctcacgcctgtaatcccagcactttgggaggccaaggcgggcggatcacctgaggttgggagttcgagaccagactgaccaacatggagaaaccccgtctctacgaaatacaaaaatacaaaattagccaggcgtggtggcacatgcctgtaatcccggccctggggaggctgaggcaggagaattgcttgaacctgggaggtgaagactgtggtgagctgagatcgcttcattgcatgccagcctgggcaacaagagcaaaactccacctcaaaaaaaaaaaaaaaagacttattttaatgagttggactcagattagctaataaaaattgcctaagtgtgaaccttcatatttcctatgtatggggaatgttacgaggtatgctggtgggaacacaggagagcacatggaatgattatcccccacttgcagaatttcttgtttggctagaaagggaacatacttgtacaaaaggcataaaaagatgtttaaagaggtgagcaaaggctcagagagtaagagaaagtagagactacagaaatattccataaaggaagattcaggaagaagtgtgtcagaagtagagcaagagcgaaggttggatttgctgactactactaatccatttctcaggagcatgtgcagatgcacatgggaggttataatgtcggtatctgttagaaccctattctgttggccagaagtcaatcacacaaccccacttttctgctagggtggctgaaaaatactttacctgtgttcctggaaggaaagtgaggcttttttgagcatttaaccagtctctgctacacacccactggaactttgcagaataaacttcagttcctctcctcctcattcattttttaaaccttcccttctccaagtgagacactgttagttctatcaactattattcatatatttatttttgttcccaaaccctctactatcctggccatcataaagcaaacattcttgatttttattgttcttctcaaaatgagatgctcactgtagaacgtaatactgtatatgtgattttttaaaatgctggtaaagtgggattattgttttcattgatttcataactatcaggtcaaagagagggccaagattggggactttgcatttttaaaaaaagagaatttgaagaaggaaaagggtctccaggatgccacttcagtatggcagctgtgggaagcactagtggtaaggtgctagctattctttcctacttctccaagaggaaaaagggtactcacactcacaaatcaattcatttccatcaaaactccaaagtgaagtcaaggagaataagtgcactcaaatgatgttacttatatattagattatggatttaaataaaacaccaaggatttctgtattaaaatctttttattgtgatgttaactagtccacatgtcttacatagtatctaggtcttatgcttaataatttggccagtagtccaaattattacatgatatataagcaaattagcattgctataagaaactaaaatttatcacctgctgctaatatggcattgatgttgtgccatttcagcatatccctatggccccattcctgatgttttcatctgtagatccagtgaggagagaaaaaaatgagtcgttttttcctgttcttttctttcaacagttgtgctttcagtgttctctgttaagaaatattataaccctgagggagtgaatgttcttatcagagaagagaactggttgaaaatgatttagtttctgaattcctagaagaagggaaaaagcctaagtgtccatctctctatctagtctactaataggattacctatttcaaatatatataatttttctaaattgagtttttaatgtcaaagtttcaggatccactggtttccatagttttagtttgtccagttgtttatggttaggctcattgtgaacagtgaccattatacttctctttttctataaatgtggctgcttttgagaatggaagttgtaggaaacagaattcattgtaatctgaatttaaatttagcttcctgttgcagctcctcccctccccctcctccctcatgtttctccctgtccccagactgtctttcagaggcagatgctatgcacataaatgacatttattgatttgagtattagagactttttcttgacagactcacccatcacaatatttaagtaatattaacagtttcccaccaagaactcagagtaaactaaacagtgagtatccaggcagaaagccatgtacttttagagctcaatatgtttataatatatatgaaggcaaacatagaggcaacataaatacctattctacttggttgtaatctgccaatttatatttttcggagaagagtttatcactaaatcactgagaggcagagtaggatatctgggggaaatggtggtgggcggggggcaagtttgttatctggaaaaaagattgggagccagggaggattttcaaattcgaatccctcagctcagtcttggggcatttgttttgccatctgaattatcttggaacccagagaaaaactggttgtgaaaactacagatgcaattttcttctttggcttttcccataatactgtaattataaaccatgctgtgttagagtggaacattctttggagagcatcctaaagtgcactttgatcaaattttgccttatgtggcaacatttagaaacacaagccttcgtggggtttctggctctactttttactgatgggctgataatcttatagtagcattagttttgccaccaattaccaaagatttgttattattggtttttaaaattggacaatccttaaatgtctacagcaacgttagaaacagacccacaagtgggtgggtcagactagtttggaaacctccaatcttggctatttggtacctcagaattcaacaagggatgttggaaaattttcaaaataaaattaatttaaattcagttttgcaaaagattatactatagaacacattgaaaaagagaaggttagctggaaagtcaaacataatagaatttgaaaattactaggctttaagttatgaaaatatttcccatatgttgagacagaatttgtattctcttttttctcaatggcattttatgagactatatactgctgctcttctgtataaatagaatagaaacatctccatttttaaattgtcatggaaataagtaatggcctgtgaacaaaatgacttctttttgttttgttttgttttgttttgatggagttttgctcttgttgcccaggctggagagcaatggtgctatctcggctcactgcaaccatagcctcctggattcaagtgattctcctgcctcagccttccgagtagcttggattacaggtgtccaccaccatgccccactaatttttgtatttttagtaaagacagggtttcaccatgttggccaggctggttgcaaactataggctgtcactctctatgctttaatattttggttaattttaagggcataatttgtggggacattgttcttatttgccattacttttcatagcaaaaacagcaattacttttgcaccaacctaatatttcctttgctaatctagtgtgacttcggaacagtgataaataaaggttggggaagaaagggctgactagtaaatgcagacagagttgaggcaatttcacagttccattggcgtgttctatgggccatttcactttcagatggtttgtctggctgaatttagaggctaacctctggggttttgcctttcttcttgtgacctgagaatttgctggcatgtacaagtcaattttcttaatagcctttcttgattagtctatagcttcttcagtgagttgatatgtcacatttacttatactaaaatcttacactagacatattttggtgtctttggcatcaaacctcttttagtcatttgtctttcttgtctagagctagtgtcataatattttcattgttacaggtttctaatacactttaagatctagaatgacataactcccattgtatctttctccttttatcttttaagaaaaagaattaccatggaaaataatgcttctgtttctgtgtcgttgtttaaagtatttacaactcttgttgtgaatttttttcttttaatatattcctgaactttatttatatatttaattagttatgtttgcatttttaaaaagtgagataggtgtatcttttcaaaaataatcattgtcaggtatggtattaggtttgtaatagctattagctattacattacttttaatggcaaaaaccacaaatagttttgcaacaacgtaatataatgaatacaataggcttccattgtttatctatgttgtggaatatagtgtaattctgaaataacttacttcttatacaatttttgttttgcttttttggtttagatcgacttttctaaaagtctttttcttttgtttctgctatatatttgttttcctatgttccggtttcgatttctttctggatcagtttcatcacttcatgttttcttacattattgccactgcattagtctgtcacgttaatcagaataggattgtatatggtattcttttgtatatttttaatcttgtttctatatttggtgaaatatactttgtaatttttaaggaaatctaaattttcttgtcttactcttgcagagttctacttacttaattgccgtttttctgctttgatttttattaactcatttttccagccttccttggggtcctgatctttttctaggtcattaaatgaatatgtcattctgttttgttttttattgattcgttcctgtgacttttcttcaggttattttgttgacctttattgaacttctccagtttattgagttgaatattttgttattttattttattcaatttttaaaatgatgagaaccctgaatgccatgtgtttttttccttttgagtccatcctttaccacacatcattagattttatatagatttttcagttgttcttaactttaaaatagtttgtaattacaatttggatttattctttagcctatgccatttagaaatgttttatgttaaggtttacctttgcgtttttatttttaaaggttatcttatgatattaattccactggattatgtgtacgtctttcacatacttatgcattcttgtggtttatataatttctatgttttatagctttcatctgcctctatctaatatatgaacaatttttgatcaactttttacaaaagtattttcttgatttgaagaatccaaacttttaaatgtaactgttagaccaacttcattaattgaatttactcatatgctttatggaccttttaattttccagctactttttctctttaagagagttttgttagactttagtactgtatttctgttagtttcttcttacagttataactatgtgtgtgtgtgtatgtgtgtgtatacacacatgtatatatatttatacacacacattgtaatatgtagtgtcttatgggctacaacattttcttagagtctatattttatttgaagctagagttttttttttttttaagtaagaagttttatttcttcctggaatcttgcaggatttttttttctgtttactcagtagtttaaaaagtgccagatatgttaaggtttaggtcttttactgatttatttttttcctggagccatgtcacccattttcctgagatcaggaaagttttcttgggatgtgtatttggttattgtttctgttttatttctctggactctcctctaggaatactgatgagctatatgttagctccctagtctctgtttttcaattctttcttcttctctattgtacttttattttcctttctccctgtgaaggcttatagaactgttaaataatgcttaagcccactgtctttcttcagtatcaattaattcttctactttgcttttaatttctatgtaatcttcctttaaaaaaattctctctcccttttcattttacccactgtccattgccttgtttaacctacctggaatcctcttcatttcatcctgttttcttttcataaaggccaatttattggttctttattaaggacaccaagtagtcttctgagtttttcttttggattctgcagtaaaaatttttcagaggtttgttctgaatttttggagcactattctctttcccctgttgtgtgttgtgtgtgtgtgtgtgtgtgtgtgtgtgtgtgtatagctcaaaactaaaataactagagaatcaaatatatatatatatattactcaattttaagtaaagccacaaagatacccaagttgagtgggtttttttggtccagctctttttctattacaatggtgttgaaaacttaatatccagtttacagtttaatgaatattgttgggtttagttgccatttcaattaccattttctgttaatttttatttaaagtatctcctctcagttggcttttgatcattcagcttctgcagcctgattctttgatactataagaagttatacacggtatctgtaattctcaacctatcaggattgctcctctgtgctctgttcaccttttctctctccatttctttttttttttttttttttttttgagacggagtctcgctctgtcgcccaggccggactgcggactgcagtggcgcaatctcggctcactgcaagctccgcttcccgggttcacgccattctcctgcctcagcctcccgagtagctgggactacaggcgcccgccaccgcgcccggctaattttttgtatttttagtagagacggggtttcaccttgttaaccaggatggtctcgatctcctgacctcatgatccacccgcctcggcctcccaaagtgctgggattacaggcgtgagccaccgcgcccggcccttctctctccatttcatcaaccaaaggctctacctctgcagactaagccttttggaacatgtggctttacgggcctctctcccctactttctgctcactttttttttcttaaatacgctggaatggtgggagaaagagcatttgcctccaagtaaaattccccaaaccaagaactctgggtcccttttatccaataaagaaaagaaggagtgtttgctttggcagaacatatactaaacttggaacaacacagagaagattagcatgaccctcacacaaggattacatgcaagttcctgaagcgttccatattttcttacgtaatagtaaagggttcgattcaacaagaagagataactatcctaaatatatatgcaccccaatacgggagcactcagattcataaagcaaattcttagagacttacaaagagacagactcccacacaataatagtagaagattttaacacctcactgacaatattagacagatcattgagacagaaaattaacaaagatattcagaacctgaactcagctctggatcaagcagacctgatacatatctacagtattctccactaaaaacaacagaatatacgttcttttcattgccatacagcactgactcaaaattaatcacataaccggaagtaaaacacgcctcgcaaatgcaaaacaactgaaatcataacagtctctcagatcacagcacaatcaaatcagaactcaagattaagaaatccagacatagaggccgggcgcggtggctcacgcctgtaatcccagcactttgggaggccgagacgggcggatcacgaggtcaggagatcgagaccatcctggctaacacggtgaaaccccgtctctactaaaaatacaaaaattatctgggcgtggtggcgcgcgcctgtagtcccagctacacgggaggctgaggcaggagaatggcgtgaacccgggaggcggagcttgcagtgagccgagatcgcgccactgcactccagcctgggcgacagagggaaactcccgtctcaaaaaaaaaaaaaaaaaagaaatccagatataaccacacaattacatggcaattgaacaacctgctcctgaatgactcttgggtaaataatgaaattaaggtagaaatcaagaagttctttgaaactaatgagaaaaaagagacatcataccagaatctctgggccgtagctaaagcggtgttaagagggaaatttaggctgggcacggtggctcacgcctgtaatcccagtacttggggaggcctaggtgagcggatcatttgagctcaggagtttgagaccagcctggccaacatggttaaaccctgtctctactaaaaatacaaaaagtagctgggtgtgtggcacgcacctgtagtcccagctacttgggagcctgaggcaggacaatctcttgaacctgagaggcggaggttggagtgagcgagattgtgccactgcactccagcctgggtgacagagtgagaccctgtctaaacaaaacaaaacaaaacaaaacaaaaaaccaaaatttatagcactaaattcccacatcaaaaatctggaaagatttcaaattaacaatctaacatcacaactaaaggaactagagaatcaagagcaaacaaaaccctaagctagcagaagacaagaataaccaagatcagtgttgaattgaaggggatagagacacaaaaaaatccttcaaaatatcaacaaatccaggagctggtgttttgaaaataattaataaaagagactgctagctagactaaaaaagaataaaagagagaaggatcaaataaacacaattagaaatgataagggggatatcaccactgactccacagaaattcaaataaccatcagagaatactttaaacacctctatgtatatatattggaaaaactagaaaaaatgggtaaattcctggacacatacaccttccaaagactgaaccaggaagaaattgaatccctgaacagatcaataacaaggtctgaaattgagacagtagtaagtaacctactaaccaaaaaaagccctggactagatggattaacagctgaattctaccagaggtacaaagaagagctggtactatttctgctgaaactattccaaaaaaaaggagggactcctccctaactcattctatgaggccagcatcatcctgataccaaaacctggcagagatataacaaaaaaagaaaacttcaggccaatatccttgatgatcattgatgcaaaagtcctcaataaaatactgacaaaacaaatccagcagcacatcaaaaagcttatccaccatgatcaagttggcttcatctctgggatgcaaggttgtatcaacatatgcaaatcaataaatattattcatcctataaaaaaaactaaagacaaaaaccacatcattatctcaatagatgcagaaaaggcctttgataaagttcaacatccactcatgttaaaaactctcaataaactagatattgaatgaacatacctcaaaataataagagccatatatgacaaatctacagccaatatcatactgaataggcacaaaacaaggatgccctctctcaccactcctattcaacatagtattggaagttctggccagggcaatcaggtgagagatagaaataaagggtattcaaataggaagagaggaagtccagttatctttgtttgcagatgatatgatcctatatctagaaaacagatagtttcagcccaaaagcttcttaatctgataagcaacttcagcagtcaggatacaaaatcaatttgcaaaagttgctggtattcctgtacaccaacagcaggcaagcagagagccaaatcatgaatgaactcccattcacaattactacagaaagaataaaatacctaggaatacagctagcaagggaagtgaaggacctcttcaaggagaactacaaaccaatgctcaaagaaatcagacataacacgaatggaacaacatttcatgctcatggatgggaagaatcaatattgtgaaaatggtcatgctgcctaaagtaatttatatattcatgctattcccattaaattaccattgacattcttcacagaattagaagaaactattttaaaattcgtatggaaccaaaaaagagcccaaattgccaagacaagcctaagcaaaaagagtaaagctggaggcatcatgctacctgacttcaaaatatactacaaggctacagtagccaaaacagcatggtattggtataagaacagacacagaaggctgggcgcattggctcacgcctgtaaccccagcattttgggaggcctaggcaggcagatcatgaggtcaggagtttgagaccaccctgaccaacatggagaaaccccatgtctactaaaaatacaaaaattagccaggtgtggtggcatgcacctgtaatcccaggtactcaggaggctgagccagaagaattgcttgaacctgggaggtggaggttgcagagctgagatcgtgccactgcactccagcctgggcaacagagtgagactccatctcaaaaagaaaaagaaaaaaaaaaagaacagatacatagcccaatggaagagaatagagaactcagaaataataccacacacctccaacatctgatctttgacaaatctaacagaaacaagcaatggggaaagcattccatacttaataaatggtggtgggagaacgggctagccatatgcagaaaattgaaattcggccccttccttacaccatatacaaaaattaactcaagatgaattaaaaacttaaatgtaaaacccaaaaccataaaaaccctagaagaaaatctaggcattaccattcaggacataggtacaggcaaagatttcatgatgaaaatgccaaaagcaattgcaacaaaagcagaaattgacaaatgggatctaattaaactaaagagcccctgcacagcaaaaaaaaactatcatcagagtgaacagacagcttacagaatgggagaaaatttttgcaatctgtccatctgacaaaagtctagtatccagagtctacaaggaacttaaacacatttacaagaaataaaccaatggcccaattaaaaagtgggcaaatgacatgaacagacactttgcaaaagaaaacattcatgcagccaacaagcatctgaaaaaaagctcagcatcacgtcattagagaaatgcaaatcaaaaccacaatgagatactatctcacaccagtcaggacagctgtgattaagaataaaaaaaacaacagatactggtaaagttgtagagaaaaaggaatgcttttacactgttggtgggagtgtaaattggttcaactgttttgggagacagtgtggcgattcctcaaagaccttgaggcagaaataccatttgagccagatcccattactggctatatacccaaaggaatataaatcattctattataaagatacatacatgtgtatgttcatcacagcactatttacaaaagcaaagacatggaatcaacttaaatgcccaccaatgatagactggataaagaaaatatggaacatatacaccatggaatgctatgcagccataaaaaaggatgagttcatgtcctttgcagggacatggttggagttggaagccactgtcctcagcaaactaatgcaggaacggaaaaccaaacaccacaggttcttacttataagtgggagctgtatgatgagaacacatgggcacatgggggaacaacacacactggggcctgtgggggtggggtggcttgtggagagggagagtatcaggaataataggtaatgtatactgggcttaatacctaggtggtgggatgatctgtgcagcaaccaccatggcacatgtttacctgtgtaacaaacctgcacatcctgcacatgtacccttgaacttaaaagttgaaggaaaaaacaaaagaaggatatgttcttagttttctatacctatgagccagtcaattggaagtgaaagctgggtatgccaaggaataactaaattccctttacggtttcaaagttagaacctatttttctcttaagattatggaattgattatccattacttttggttttaaaggctgtcttcaatggttttagtgacaagttggtcacagcagcattacatgattttagccagaagctattttgaacctaaaattcctatcagaaggttgaaaaaaaacctaattttacttttatttagagcttgtgtgctaattatttgatttttaaatttccgactccacttggaatgaagacacaatccagtagttaatattaaagtatgaactttcaattgtttcctttcttccttttttttgagataagaatccctcaaaagaataagtgaaacagagacttcaaagttccgtggtgactgttgaaatataacagaatcgcactgtgtttgaatttactgtgatatatttctaatgtcttatatttggtatgtttctcttgttgttattgctgacacaaaccaaagaacaagaatttcttttatgccactgatttgcaaaggtcgtatagaaaatgaagggtcagataatggatgttaatcatcctcattgatggatacattgacaggaaaacataattgaattgcacatattagtggaagataaaaaaccatttcacaaatcgttcttagtagagaaaaaaatgataggagagctaaaattgatgtgaaaaacacagaaggaagttaagggattagagtgggagggaaattagtgaatatctatttgtgtgcatgattgcatttttgaaataattagttgcctaatttgtgtatccaaatatagtaattgtttttccatagtcatgacttaaatattctctgtgtgtaattttcagttgcatacatttttttgcagaatcaaattgcagaggaatacattcatttgaaatttctctagggatgtgtttataacccattttggaaagagtagaaagattttttttctcttccaaatggctatgaaggtggataacttctctgatcttttagtaaacacttttatgttagttgaatggtatgcagttagtcataaacaggagagattgaggaaaaataacatgcttaatgcaaataaattttctgtacctgataagttaattggaattttttcctgtaatcttttttttttttatttttctggtagatgcttgttgatttaaggtaagatagaaaagaatcatcaaactatatgtaaaccacagccaaatgatgaattcatagtttttgctcaagtagagggattatctgaaagtacaaaaagaatttgataattgagaaatacattattttgaatgcacatttgaagtagctaaaaattctacgccacagctgaatgcactggcagtttgttaatcacatccataaacatgagtcttctacaattggagtgggccccacacttggaacatcttgaagatgtttcttctttggctgtgctaaattaagcatgcaaagaagttatattgtgttaacatttccacaatgaaatcttattggcacttcctgtataagtggctgggaatagaaattctcatttatgaatcaaaacactttgcctttttatttggaggtcaacctactaacctttggttataggataataccagcaattttattataaagtgtatttcagtaattggaactgtgttttgattatacaattggatagaatgtataataaaatgaaatgaaagaaatttctcccagaagattgagttaaaaatgttttggtgatgaaattgagatgatgtccagatttatagcatgtttggtaaccataacatacttctcgatatattgaattccatgtaaatgcttatttcttcaaaccctttaaatttcagagtattttctcccttctgttattaatcagttctattcatagtggatcttagaaaattatccagtgattaatatttctccatatttgtagctttcattactttatatttctgtttttgcctaggctccttgttaccagcctgttctaatgtcacaaaacttggcaaaccctacccaagaagggtaaggtttagtatctatgaattttgaaaatacttgatgagaaaagttgcttttaaattattttgaatcttattaataccaaaaatatttgaaaaagagaagcaggtacatttttccaatattcaaatttcattcaatgtataaatactcaaacctttttttataaattatactttaagttctgggatacatgggcagaacgtgcaggcttgttacataggtatacatgtgccatggtggtttgctgcacccatcaacccatcatctacattaggtatttctcctaatgccatccctccccttgccccccacctcccgacaggccctggtgtgtgatgttcccctccctgtgcccatatgttctcactgttcaactcccacttatgagtgagaacatgtggtgtttggttttctgttcctgtattagtttgctgagaatgatggtttccagcttcatccatgtccctgcaaaggacatgaactcattcttttttatggtggcgtagtattccatggtatatgtgccacattttctttatccagtctaatattgatgggcatttgggttggttctaaatctttgctgttgtgaaaagtgctgcaataaacatatacgtgcatgtgtcttttgcaatagcatgagggaaggagattggaaaacattgactcattgtacaatttaaatacgccaactttgtcaacttttattacaactggaaagcacttatggtacttattagaaagaaagtgtgtgtggatacgtatgtgtgtaaaaatatggctcttcttaaaaggaggcttacccagtcatttttttttgaataatagctgcattggaggtaagaaggtacctcaagacattttctctaattgtgcaggaaaaaacaaataaaggagatgaagactaggctgctgtcattctgtgccatctctgacatctatggaaagcctagaggcccaagaatacttcctccccagggtgctattgcagtatcttcagggtcctgagtctgaatgttcctattttatgtaagcattgtacccagaagaatgggtcagaacctctcctatggtctgaatgtttgtgtccctccaaaattcatatgttgaagtcctcacctccaaggtgattgtattaggagttgaggcctctagggggtgtttaggtgatcctcatgaataggactggtgctcttataaaagaggccctagggatctccgttaactcttccaccatgtgaggacaccgtgagaaggtgccatctatgatgaagctggcccttattagacatcaaattctctggttccttgatcttggacttcccagtctacagaatgtgagaaataaattactgttgtttataagccattgtgtttgtggcattttgtttatggcagcccaggtggactaagacagccttttaataggcaaggggatctaaagacataggtgaaccaagcaagtcagtctgcagctcagaaaactcaagtccccattcaggcagctgcctgatgatgttagctgtaatctcctgtgtttgtgcctgacttgctgcctcagtttagctcagtggttctcaactgggggcaactttgaccatagggacattaggcaacgtctggagacattgtcacagctagaggaagggtgctactgccatctagttggtagaagccagggttgctgctaaacatcctgcagtgcacgggacagcacctcctcccatcccagcaaggagtcatctgtaggaatatttgataaaagccatctacataaaagcccaacagctcacatcataattaaagatgaaagactgcttttcccataagattgggaacaaggtagtaatgactgttctcaaatctctattcaacattttactgaaggtcttagcaacagtgcaagaagaataattaaaactcatacaatttgcaaagcaagaagtaaagcagcttttattcacgtatgacataaacagatacttaaataaccataaggaatagcttccataaaggggacttgaaccaataagtgagtttagaaaggtctcagtatctcagtcaatacaaatttaatcatgtttataaatacaatggacaattaaaactaaatatttaaacatttcatttcttataatgccagaaaatagaaaatacttagtagcaaatttaatgaaatatgtgcacaattcttatactgaaaactataatttaccaagataaatttaagaagacttcaataaatggagagatatactttgctcattgatcagaagactcaataacaatttaggatattaatttttcctgaattaatctatatattcaaatttatcttaatcttcatcacaatggcttttattttataggaattgacaagcttattctaaaatttatatgggagagtaaagaaggtagaatagtcagaataatcttgaaaaacaacagcaattctacctgactctataaaatatagttgtattataactgtaaaaatacagttgtattaaagattatgaggttttgacataaggatagacaaataaatgaaggaaataaaagagtccagaaatagacacacatttataaagtaaattgatttttttcaagacaccaaagcaattaaataaaggaatggagaggcttatttataaatgaaattggaataaattgatatccatatgggaaaaaaataaattttcactccctaaattcacacctcagacaaaaatcaattcaagatggattggagacctaaaagcaaaggtaaaactctgatacttcaagaacagaacatgacaggattcagaaaattataaccctcaaaattggtaaattagactgctcatcaaaagacatacgtaaatgagtaagagagccactaacaggacaaaaatatttgtaaaacatatctgacaaaggactttaatcaatatcacataaagcacatctacattaataagataaagaccaaagaaaatagctcaataaaaatgggcaaagcatttcaagggacactttacaaaagtaaatatacaaatggccaatgaacacagtaaagagtgctccacatctttaggcttcagctaaatgcatttacaaccacaaagaaataccaccacacatccactagaaaggacaaaattaaaaaggttgaaaacaccaaatactggtgaggagttagaaccactgaactcttacacttgttgataggaaaattaaatgttgtaactactttgaaaaatgttttgcagataataaaatgttactttcacctaccctttgacctagcaattccactcctattgtttacccagaagcaaattttatgttacacataaaaaattatatcatacataaatacttgttaaaatattcataaacccacatattcataaacccacatattaatcaaaagagaatcaataaacaaattttgtcacagttatacaatggagtattactccgcaacaaaaatgaatgaactactgatacctgcaacaaaatgagtgactctcacagacaaaatgctgagtcaaggaatcgagacaaaaaggaatacatgtggtatgattccatttctaggaagttctagaacaaaacttaggttagaaaaagggaaaaaggttagcctctgaaagggaagactgaccagagagatgagagaactttctagggagatggaaatgttctgtatcataaggatgtgggttacatcttttttttgtttgtttgtttgttttgagacagagtctcgctctgttacccaggctggagtgcagtggcgccgtctctgctcactgcaacctccgcctctcaggttcaagcgattctcctgcctcagcctcccgagtagctgggactataggcgtgtgccaccatgctaggcgaattttttgtatttttagtagagatggggtttcaccgtgttagccaggatggtcttgatctcctgaccttgtgatcgcctcccaaaatgctgggattacaggcatgagtgcccggccgcgttacatctttttaagtattttaagtaaattggtagtcagtgttcaggaatccttctaatgactcttcaacaggggtggcttatgaaatagttcatcaatttttttttctgataaggggaggttgaggcaggaggattgcttgaacttgggggggcagaggtttcagtgagccgagatcataacacttcactctagcgtgggtgaaagagtgaaactgtctcaaaaaaaaaaggggggaatttacactcttgaaaataaatatttcataaggaaactttagagttctccaatatacatgatcaaacaaggacctgttaccattttggaccatgtcataatagagaggagatagttcaaaattagtcatatgttccaacaacaacatgattatggaaactagtcttagaattgagagtaattgaagtttttgtttttactggtattaataaatggtattactcaattcgttgacagtaccagtctctgcaatatcttttgttggggaagggggagaggacctgttcgtctaattagaaacacatctacattttaagaataaaatattttacatatactttttgttattaaatctgcaaactctagaattggaagaaatagccttcataactcttcactgcaaaagttatgaatgtttgatagaattaattaaagcattcagtagaattagacttgtttggaaggactgtaggatctttggcaagaagtgtgttttatattgtttcagatgtataccattttctcttaaggtttacaagttaatcaataaagattcttggcagagctaagtacaaaagaacaatatgtatttcgcataccaaatggatctaagtcttaagtgttatttgatgtctcgaaatgtttggctttcaactttgtttaaatgaatagtgtgtatacagtgaagacaggctttacttagccatgcctagaccctctgtggattctctcataatcctcagttattgtaaaccatacttagtgagaccaaaaggatattttgttttggctgcatggtattattggaaaacggtaaaaattttattctttaaataatgtgtttttctattcagaaaaataatgtctatagagatagttatttcaaaatgtagttttcaatatgcacttgtgggtatgaacatgaacaaacacatgcagacacacagagtctgacgttatatctagaatgttgaatcctacttttctacttaacaggaatgtttccctatgtaacgaaaaagtctgtataatgtgtctctattatgtgtattatatgaattatatatcctaatttacttaaccattcttttattgtattggtcattttcccatattgcatacaaattattagggaacatctgtgtgcaaacatttttatttacattttggattatttacttagaatagattcccggaagtgaaactaccaggtcaaaggcttttcccaatttatttttcaaaaagaaattcccactgtattctatacaagtatgcttgtctcactgcccagttgctagccttacatggttttttttttaattttgttttttataaatagaatctcattgttttagtttgtatcttttggattactagtgagtttgaaatttaaaaacctgtcttttcaggcctttgtcttttagggtttttaggattttcttaacgattagcatcatctcttctctaaaaacgttatatttgttcgttatattgtaataggtttttttttgcttttagctattaagcttttaattatatacttgatttttaatttagaaaagtaaaattttcttcaatggagttcttttttaaattgaattctttgacatttttattattttgttcaaagaaccctatgggcaagtggaatcttacacttttattacctggatagcggataacattcatagtttgatatttaatctgtagcatatagttgacttttatttttggaatatccttgctttaaaactacaactaaaggaaggcagatggttagcttgttttctcatttcctgaaaatgtccaagattggaaccaatattatcagtctgtaatggaggttggcaatgtcaagatggtttgtatccatgtcaagatgttgaatcagtgtccaggtcattgctcattaaagatgttgctctttggataaacaggaaacccagaaaaaagattctaacaatttttgatgctacctcacattccttcgagacagtgcagaacatttcgttctttagaaaatattcaggtctctttctttgtgttacagcacttactatttgtctatttgtattattggcttgtgacccttttttggggggttacaaatacactaggggaaagagtatttttaaaaatcattatgcctttgctttatctatgtctgtatactctcctatttgttattattatttttatttttgagacagggtctcactctgattgcctaggctgcagtgcagtggtgcaatcacagctcactgcagcctccatttccccaagctcaggtgattctcccacctcagcctcctgagtagctgggaccacaggtgtgcgccaccatgcacagctaactttttgtatttttagtggaaatgggatttcactatgttgcccaggctggtctcaaactcctaagctcaagcaatctgcccacctcggcctcctaaagtgcttggattacaggtgtgagccaccactccctgcctcctatgtattattctatatgtattttttcatattaatgtataagttttttcaagtatgggttattccatttgaacaaaccattaattctctgctcgtctatagtcatttcttattagatgtgtcagttcttaattttatcacacattaatttctttttttgttccttatacattttgtttccttgagatcttcagaatgtaaatcaatctccattctgttatgatttataatcatttacttctcagatgattcctcctttagtgctttgtgccttctgttatattcttattacttttgatcttttattgttctaatttcacctcttctcaacccatccccacactggcaactgttatatgaatggctggtcagatggaatccacatatgttccgtatgcatgtatagattttactcaagccactagtggagacactattcctacttacacatatgagtaccaacctctctgtgatgcagcaatcatatcttgacatatctagaaagtttcatcctcatccataaattacttcatctttctccaaataactcagggaattttacattaacctacccaatttaacaatttaggaaaaatcaattcagtgacatgaggtaaaagatgcgctgtcaaaattgcagtgtctctaaggtgattctttttgaccagactagaaacactaatctggcactattttagttggggtttcctggtacctttccatgccataaaaatctctataaaacagaacaaattgcacatttaattatagtttcaaaaatttgcattcttggatgaaactttttctcttgtcccactcttgccataattgctacattgtctactgttaatttgcattttaactgagctttaaacatttaaccagaggatggtccaatcggagattctataaccatctcagtaattggtaggcaagttattttttattgctatttcagcagtagggaagtctcctctacaggggtggggaaagagttgataaccttcaaaacagactctttactttggggctgtgatgagagaaacagaacagaagttaggaatggtgaaattagaagagacagatggtgagagattatcatgatttataggatcacccaaattgtctaaaatttactccagaactttttaccagttagggcaaaatgtcatgcttattttgagctcctatagatacatttaaatcagacatactggactttgcattctgttatttttttgaggggggtgatatttaaggagttctagaaacagcctacattagacttagtgtttccagcaactaacaaatttaaatgttataaacatttttctaacgcattttcctttaaaccactctggggaaagacatgaatgtaagatgactgattctcagattatctgcttttagaacaaccttcttttagctgcaaaaacgtagtgacggtgttctcaatgtgagacggggaagattttagtgggcacagcagctgttgactcaaatatagttatacatgttccttctgtgttttcttgtaggtgaatcagcagtttagtttattatgaaaattagcaatctataagatgattctgaaaaatgaattctcagaaatttaaggtacacacatggcatgatttggtgaatatgaagtgctgaagtgaaatactcatatcccattgtgatcattgatgttcttgttgcaattatggtcatcatgtcaagaacaaaatcaatttgatgcgattgaaaataacaaaaatgctttatgtcttttagagaaaatataaatgattcattgtaaatgagaaacctcaaactgaaagcacataaaataccaggtatgagtgttgcattttgaagtctctgactacatgagagttgtctgtgaaataaaatatccagttacacaaaatattctttatagttaaaaaactttttttcatacatatcactagttaactatttttagtcccatctttcctatgtgcccagcagtgagctaaaagctgtgcatttaatgcattcttcattgtatttttgttttgttttattttgttatttgtaaagatgggaaagaccaaatgaaaagatgtcaaacttttctgggggtggagaggacatttgcattttgaatttagaaacctaaattagaggtttaggaagactcataaatatgtagcagaggtttggtggtcacagctagaagctgaccaccaccatggggcaaataatgatttaacctcctcctgtaagtatttgatgtaagatcatcggtatatttcatctgtgacattatccaagaagaagatgaatctgagggaaacaatgcttgcagatttgagggggaaaaatgcttggagtagttagtctcgggatagccctaggtgatgataatccttgcacaaacacagcacactgttagaacagacaaaagtctgcagaggttaagaagacccttgttacattggaatctttcaatcacttctagaaatatgatttagttaaatcaatattttatttagctctaggtacaatattgatgctaaagaagttcttgttgaaccaacaaatggatgctcctttaaaatgctggaggcatcataaatggcatgttagcatcaggtacctccctcttggagcttacacataaaaacaaatgtacacaaatagcaataatcaaataaaatattaggggattgtgtcaaatgagagctagtgacaactgttgatttaaagattcagccatttcaaagttttagaagttttagggatataaactaaagagtccagagaaagcagggaaagtataaactatttctgccaaggatggggattttgaggcaaggttggatattgctattaggaagaagtggcatttgagctgggtaggatttttacattcagaaatgtgaataggcacgtgtagagaaaaggaggcagaggattctggattgagggaatttattaattcttcattctacatttgctgattacttcctatatacaagatactaaactaagtgcaaggcacacagggtaaataagaattttagttcttgtctttgaagagccttcccgcagtagaggaaacacgtacttacaagaggcaagcaatggtgccctaaggcctgaagggggcgcctctcctacacagcaatacgagggtggagtttattttcatggcacctcaacccatctgacagctaggggagctgcattttccaacagaaggtgcattttgtatatttgtaggctgttttatacactgctttgtgctgaagttattcaggcatttctcttccctctagaccttaagttcatggaggccacaagctaggttttaccatttttgtatccgtctgtgctgtctagagtagtgccttggacacacagtaaggattaaagactttcggaatataattaaattttgcttttactgggaaataaaatatatctcatagaaggcatggttgtcctattcttcatctagtctttcaaagtctttacagtgtgttgtgtggcagaggccaacagtagttaatactgtgttgaagccatacctttcatacttgatgttatttttgaacaatgaaaactttgcaggaagttctcatccctttgtggctaagatattttccattaagggggaaacaaaaagagaaacattagcaagctactcatttatttcttttaaagttacttgttagaaagtcacctttcaccccaatttcacattgaatttaagttcattcctacctatctgacagtaagtcaatattctgagattgtttcggaggcttcttatttttcctcagctgtaaactgaattaccttttaaacgattttctagctaacagtaaatggtccataaaacatatgaataaaaatgaaggcaaacatttcatgcttaaatagctataatggtagtcggtgtaatgggctggagtttcaaaaataaccagtgatgaatctcttagcggccacatcatattatctgtggtttttgcagaagtgtcatttgcagctattctgacacacatcttactctagttggcaatttatgatgttttattctatgtaaacaaatgtctgtctatctttagagtacaaatatctacggagatcaaatgtaagaaaaaagtggccctgacttggtttcattgttgtcaaaaatggtctttaagaatgttgtttttctttagacaatattacttaagtatctacaatggcttgttgtatttcatgggaatggtattactttacagcttctgccagggtatgtatcaatcttctctctcactaaggaaacagacaaattctgctatttcttaaacagttttttgtggcacttataagaattatcatgtttcccgggttgttgtgacagactgaggatagctatgcctgaattcatggtgacggtaaagagaacgtgtagtgttaaacgggcgtcctgtttgcctgaagttgtccaatcaaaatgtcttcattgataccagctattttcttaaagctctgtatttgctcagaggcactgaaatgttcctttcccctttccttgtgcactctgaaacattttagaatgcttttcaaatcttgaaatctggtgattgcatttgaaacagttttataaacatgcaaacccactcatgtgatctgctgggttttcgttgaaactgccactcacatgccagggtttgtacaaatagacctgaaaggaattctcaaggtcattttattgcaatccatatttgatgaatttgggaagttgtgggcaccacgtcactctgtgaacttgtagcagggagctgaggctggtaaggtagtatctctttattttcactttagtagtgttatattcacacatagcttttcttcttagggtagaagtcttcctctgctaacctttgatttttttgaaatttcatttttttaattcttcaactcccaaacagattcgttgtttttcttccctgtaattttttatttatatctgtgtgttttgattaaggttactttctagttgtaatggggagcattaggcaggttttttttttgtttgttcttttctaaataatcaggactttacacaaagttacaagctcaataagcaacagccgaatccttattctacatatttttcagcagagtgccttatcagacactatgtcctctctaaagtctgcacaccaatgtctatgacattctagacagctattctttagtacacctttgtacttcaggtcccctttgtggcggtgcatgtttgccaggaatccaaaatctgttaatgactgttgtacttgctattatattatatcatataattattatgtagactgatgtaacatataagtaaagagaagtgtttatgtgaaaactaaatagaatgctagtaaatttgctaaaaaaattactgtagaattagatgtaggtgagccaatcataaaagattgggaggaaatgtgaatgattcttagattgcttctcaagtgccttaacttctcaattacaaagaaacactgtaagccatagatgatgcataatggatgttcttgatgtaagacattgtagaaatctaactaagagattcaaactcaaagcaaaggccttggctctacatcaaaagagtagccaactatgtgcatttaagtgttgccatttataaagaatacttgaggtattatttctgaagattcttgactttaatatattcatttaacaaactggccaactacctatcctgaatatgtcatatgagagggcttctaacatgagaataaatcacaagcctctagctgttctctattttaaagtggggatgaaaggtgaacaaagtgttacagattctcactatttgagtatctaatagtgatggggaggctgtcctgttgccttagttgtcctggagaaatatcatcggggcctcttttctgtgatgcagctcatggcagagtacaccactgtcatcctaaacttttagctaaaagcagataacacacttctttttcatataatgcatttgtatctgaattaggactttagtgttacggttaagacctacaggcattgattactttggggtgaagtctggtgaccaaagacagtgttcctaaaaagtgcaacttcctgggagtttccacacctagctaggagattgtctcagggactttttacccagaagataactctattattggtaggcttaataatagcagaaatacaggctaccttattttcatgattatgcatttttaacattaatttttaatttccttgagatcaggtaatagaaacattaatagctctctatactaccaggcatagttacctaaaacaaggtgagtgctaaataggtgtaaaaataatgatcaagctcccaaagtgtactatttagttattttgcatgacaattttaacagaaatttgtctcctatcacaaattgcagttttaccatatcaattagttggatcttgtctcatctttccgttcactgtgctacctagtgtggatgattctgcgtattttaatgttgagatgtgaccacactgtattcattcagctggtttctcagaactcgctgaatatgggacagtttttttttttcccagtagtgagcttgactctgtgcataggaaatacacgcagtcctcatgtgcctttcccttttctgcagatggtagttcatgagcctccctcaaatataacagcagctcataggtgaatttatcaaagagtatggccaccttgggagacctggcacattttacaggccctgctgtgatatagaacaatcaactcaatttttttatgtgttctttccattattgtaactcccatgaggtaaagtgttaagctacattaagcctcattaagagaaatttgagttcatgatgcatatgtaacttcgcagtaattgtaattagtacaatctgcttcttgaatttgctaacatatttgggaaaaatgttaccattttttatttcttttaaaacatttaatgccaaaaacttttcagtagagcatttagtacctctcacaaaatttcataagtggctttgattgtgtgcagaattacatcaaatgattaggagcagacagttcatgaaactaagaacataatttacaacatttgtaacaaaaaagtatactttgagtctcaaagtatgagtaaaacctgaaattgaattttttgaagtcaactatctcctatatattaaccaaaatttatgaaaaaatatctatgacaaaataagacaaaagatgggcaatacttctaatagaagagggagataatgcattaggaagcactctctgtgtagatactaatgaacctgagggtataagatggagataatattagaaaacatggtaatatagtacatactgctcataattatagtcagaaattttaccacccctctcagtaattggtagagtaagtagacagaaaatcagtaaagatatagaaacttgaaaaaacaatcaaataactgcatcaacattttagaacactccacccaacaacagcagaatatacattcttttcaaatgtgcatgaaatatttaccagtataaagtatattttagaccataaaatatatctcagtacatttaaaaagatttcggactatgttctcaaactacagtggaattaagttataaatcagtagcagaaagatgcctgggaagtccccagatatctggacactaaatatcatgcttccaaataactcatatgtagtggattgaactgcagcctccaaaagcatatgcctatgtcttaacccttggaacctgtcaatatgaacttagttgggaaactgatctttgaagaagtaattaagttgaggatctccaaatggaataatcctggattatccagctgggccccaaacccaacaaaacgtgtctttataaaagaaagaagacaagaggacatagatacagagaacatagtaataacaaattttatttgtttcatttgaaatcaacaaatttttaatgatgatggactccatgtggtttctaagctggagcttctcattatttctatgaaagccacttagaggaaaaagaatgttttcactgtcactgaaaccttgggatcttcatattagaccaaattaaacaagttaccacaggacttccaacctacaatatgctaatgcactcttcaatcttcattgatcaaatgtagcatattccagatttttttttaccgtataatccttttttccctgaatagtcttgcctgacaaatagagctcattttgagaaatatatatatatatatatatatatatatatgtttatttctctcttgttctttaaagattaatttctgtatcacatgaatttctgtatcacagaatccttttagattctgtacactaggaatgataatgacttacttgttttatatgttgagtaatgttgtttaaaacgatgttatttctattgaaatagagtatctctcatttttttttccttttttcctgttggccagtctggagtgcagtgctacaatcacagctcactgtagactcaacctcccagactcaagtgatcctcccacctcagcctcctgggtagctgggactacaggcatgcatcaacaggactggctaattttgtacgtttttgtagagacagggttttgctcttgcccaggctggtctcaaattcctgtgctcaagccatctgcctgcctcagggaggcaatcccaaagtgttgggattacaggattgagccaccatgctcggccccttcttttcttattcttactttttctattatttttcacttcttttactaagtttattattaactaagtaagttaataattaacatttcttttgcttaatttttaaaaaaagggttggtcatgttaaaactgtcctgaataagatctactatctattgaaataaattcttgttcctttcataaatttattatcatttagaataattctttgtaaagatttcatagatttcagccatcgtagttggtatactacagaaatgacagtggggagagacaggaataaagttaaagtagtgtggatatagaatcagtacatttagtgactttttaggaatggcaaataaaggattattgtaatttctgttttggtttccttggaggttaatatttcctactgaaatagggaaatctgaaggaagagcaaatttccacaggaacgacaagaagtttgattttggatttgtgtggttttgaggtactttcttgtacgtttggagaaagtatctaacagggaattctgctactgaaacaaagtagagtgagagggaggggtagacttagctcccctgaccttgtatgtatggagaaagtatctaacagcgaagtctgctactgaaacaaagtagagagagagggaggggtagacttagctccccctgaccttgtatgtatctctttttcaatatttatttctaaactagtttgacaatgctgcctatgaacttaagcaggtgcctgaaatgattgaaacgtccttgtcagcaggcagtgtgtttcacatgttaagttcagtaatggtgaacttaatgtcctctgctatattgacctccaaagccttagagatttgtggcctaagaattacaccagatagatttttatctcagcccttattttagataataaacatatttttaattagtaagttaataattaacatttatagagccttaatgtgagcctggccctgctatatattatttatgtttaccaacttgcttagctctcacaatgatgctatttactgatgaagagttaagtaacttctcaaggcccatgatgcatcctgttttcaggcatcaggtgctgagggtttgttccagcagcctctgacatctggttatatgaacctgaggccacgaagtgtagctctccctgcctcagattatatctataactttggcttgtacttgttcctggtttgtttcttactctcttgttttatttaagctactgttagtgacttagtaatgttttcagataatttctattctgcaaaagttaaatttaattatattcactaattattcatcctattaaagaattgagacttccaggaagatggagtatacatagctttccctattcctcctgctaaatacaactaaaaatcttggatattttatatatatgtgtgtatatatatttatatatatatatgtatgtatatagaggaatactctgaaatatggagagaaggcagaaggcagactagcttggggccttgggaccaaaagaaaaacatattaattgctgtgtcacatgagtttcaatcaatttagattccttactctaggaatgataatgacttacttgttgcatatgttgagtaatgttgtttaaaacgatgttatttatatagaaatagagtatctctccttttttcttttcctttttgagacagggccttgttctgttgcccagcctggagtgccctgggttttctttttttctcatatataccagacttggagcttaagaaatcaacaacatgggctgagtgtggtggctcacgcctgtaatcccagcactttgggaggccgaggcgggcggatcatcaggtcaggagttcaagaatagcctggccaatatagtgaaaccccatctctactaaaaacacaaaaaattagccaggcatcgtggcagtgtctgtagtcccagctactcaggaggctgaggcagaaccatgtgaacccgggaggtcgaggatgcagtgagcccagatcatgccattacactccagcccaggggatagtgtgagactctgtctcaagaaaaaaaaaaaaaaagaaatcaacaacacaaaaataccaatgcattacatggtaagcaaaaacattcttaacaaaagcatgctttctataattaaaggaccagagagggtcaacctaacaagacaaaacttttagataataaccaccatattccaggtaaataacagaaaaagcattgtggacccagtcacatctatacctgcaaaagccatgtcgggagcttaggtttttacttttttgagattctgatgaagtaccccaatgtccacactgggatagtgtcagaaaaggcaaggagggaaccaggagttttatcatcactgagctccatttctattctcagtgtcagtggagaccacatggtaattctggacttccaaagccatctggaagtaatagggtgctctttcttctcctgactgggctggtgtccgtggaggcctagacaatattcaggaccttcaccactgccctatgataacaaggccaccctcattacagtgttccaactgggagttggaactcctagaattctcaccttcacccagcagtaataaggagcctcttcctaagatgctgaatggggaatctgggctttgcatccatgtggaaatcatgaggcagtaccacctgccccttcacctgccagagaagtgtcagagaaagccaattaaaacagaagatttaaataagaaatggcatctcttaacataatttaaaaatgaacaggttttaataaattattcttataccaagaactagatctcaaaatgaaggaaaattgcaattaatagataccaacactgagatgacagaggtgttagagttatttgacaacagttttaaaatagtcatgataaaaacgcttcaatgagcaaatctgaacacctttagaatgaatgaaaaagtagagaacctgaacaaggaaagagaagccctcagcaaagaaataaaagagaaaaagatgagccacgtggagttttagaactgaaaaatacaataactaaaagaaaaagcttagtggatgggcagaatacaggagataaaaaaataataaaatggaagacagaaattacctagcctaaacaacagaaaaaaaataaatgggaaaaacaaaacaaaacaaaacaagagcctaatgggcccatgtaattataacaaaagatctagcattcatgtcatcagagtacagaaagagacgagaaagagggatgggatgaaaaactacttgaagaagtaatggtcccaaacttcccaaatttggtaaaacacataaacctgagtgaaccataaacaggataaacccaaagaaattcataccatttcataattaaactttcaaaaatgaaagacacaaagaaaatcttgaaagcagccagagaaaaattattccttacttatataagaaaatcaatgaaatggcagtagatttctcatcagaaaccatggagaccagaaagaagtgacacacatttttttttatgtgctgaaagataagaattgtgacctatactgagtgaaaacaccctctttaggaatgaagaggaaatcaagacatacttagataaaaacagattatcaccaggagatctgctgtaaaagaatggctaaaggaagttagctaagcagaaaggaagtaacataaaaaggaaccttggaacatcagggaggacaaaagaacatggtaagcaaaaatatgtataaataccatagactttccttctcctgagttttctaaattatgtttgatggttgacaaaaattataacattttctggtgtggttctaagtgtatgtagagaaaatatttaagggaattataagtgtggagggttaaagggacgttcaaagaggtaaggtttctatacttcactttaagtgataaaatgacaaaaccaatagactttgatacattaaacaaatatgatgtaatacctagagcagctactaaaaaagttgtacaaacaaaaagtaaaacagtagagttaagccctagcataccaattattgcagtagctgtaaatagtccaaatgcaccaattaaaaaacagattgttacctttttttgtggtaagaagacataaaatctattctcttagcaaaatttcagtatatgatgtaatattatgaactccagccctcatgctagtacattacatctctagaattctttatcctatataactgcattatgctatggtacacaggatggtttccttgatttcttgtttggatagatcattattggtgtaaagaaatgcaaatgctggtatgttggttgtgtattctgcagccttactgaattcatttattaattctaacagatttttgtggaattttgtatcatgtaatctgcaactaggaataattttacttcttcttttttgatatggatatatttttaaatctgtttcctctctagatgcttttgctagaactttcagtattatgttgactagaagtggcgagagtgaggatccttgtcttgtactggcttttagaggaaaatccgcttttccccattggatatgctaattttcttttgtttgactgtagtaatcattttattatgtatatgtatataaaatattgttttatataccttaaatgtatacaattaaaaaataaaaataaaggcacatgatgtaaaggaaaaaacaaacagaagaaacttaaagcaaaacaaagcaaaaaacaaagactggcattatggaataaaaaatatgacctaactatatgctgtctagaagcaactcacttcaaatataatgatataggcaagttcaaaattaaaaagataaaaatgtatatcatataaatattaatcacagaaaagcagaaatagttatactatctgataaggtagacctcagagcaaaaaaaaaatactagtgacaaagaggtacattataaaatggtgttaaaagaaaaactttagacaaattaaatttaacaagtttaatcaagctaagaatgattcgcaaattaaacaacccccagaaccagaatagattcagagcaactctggcactgctgtgtagtcagagagaatttgtggaaagaaaaaagaaagtgatgtacagaaaatagaaatgggatactgaaacacctggattggttacagctgggtgtcttatttgaacaaggtttgagtagttggctgtctgtgaatgctaaagtatggctgctgtgattggctgagactctgctacttacaagagtaggttgctgtctatttacacaccctgttaggttacagttcactatatacatataaaccatcaggcctaacttaaaatgtgtaaggagtcagctttaggcaagtttaattaggcatggtaaaagggtcacttcaccaagaaaatttagcaatcttaaatgcatatgcagacaacagagctgaaaatatccaagcaaaacctgatggaactgaaaggagaaatagacaaatcttcaattacagttaagactccagcccttctttctcaacaattgatagaacaactaggctataagtcatccaggatatagaaaaactcagcaccatcaaccaactggatctaatcaacacttagagaacattcctttcaataacagcaaaatacacattttccccaagtgtctatagaatttataacaatacagatgattaggccatgtaaagaacctcaaccaatttcaaaacaattaaatcatacagagtgtttgttctttgaccacagtggaatcaaaccagaaatcaataagagaaagataatagaaaaatctgtaaacatttagaaactaaacaacaacagacttctaaaaatccatggattaaagagaaactctcaagggaaataaaaaaaagttaagcttaacaaaagtacaaatgcactataaaatttgtgggacacaactaaagccatgccaagaaaaaaatgtatagtaccaaatacatacattaaaaaagagaaaaagactccatcaataacctaaacttttacctcaagaacctagaaaaaagaaggtaaaattaaacccaaagcacacagaagaaaagaattggttttgtaggctgactggggaaaaataatttatacaaccttgcttctgttaaaaaaaaaaacatgagttcaaaaaacacattgtggccttcaaaatgccaataccctattaaattaccagaaattaaaattaataaattgattgatggttactgtaatgattaagataatggttacttgtggtgaccttttttccaatcataaccaaacatatctctggaaatgagtcactaaggatgatgcagcatctttctttctcttttgattaatcaaaattatattaaatatattttatcttatattaaagaacagtttagtcatgaatttaagctggtgttagaggatagctaagttgcttctcatagtcatttccttacttatgtaatgaagagcagaaaaatatttttaccagtggttctcaaccttggctggaaatcagaatcacttagggagcttaaaaatatactgatgcctgggtcccatccagcgagattctgaattgttctatggcagaaattctcaaaatacagtattagcctctcagcagcagcagcagcacttggaaacttgttagaaatgcaaattcacaagccccatccctgatctagcaatctctgttttaacaactccttcaagtgattctgaggcagcaggtctcaagctttaatgtgcatgcacatctcccagggaatcttaggaaaatacagattttaatttgtggtctggatattacacactgtcacagatgctaatactgctggtagcaaaaatataatttgaattacaagggtccataggacatctggatatttgcattttaaaaaattttccaagtgggaatgcagccaaggtgaaaacaactggtctagatagctttatggtacactgccaatagcccaagcaatctgaatgatctctgcttggttttctgtacctgaggttgtagagtcactgaagagcacatacttcttgttctctttaaagtgataatccggctggacatggtggctcatgcctgtgatcccagcactttgggaggctgaggcgggtggatcacttgaggtcaggagttcatgaccagcctggccaacatggtgaaaacctgtctctactgaaaatacaaaaattagctgggcgtggtggcacatgccggtaatctcagctacttgggaggctgaggcaggagaatcgcttgaacccgggaggtggaaattgcagtgagtcgagattgcaccactgcactctgcactccagcctgggtagcagagcaagactccgtctcaaaacaacaacaacaacaacaacaacaacaacgacaagaaccaaacaaataacaacaaaataaaacctaaagtgatgatcactgattttaagtggctccttagttgcctaagaatcccagttgtgatggttttatcccttattgtctagaactaatgttgaacaccctgctttttaacttcatcttgtttttctctacccccatcatcaatatttgcctgactcaccatctttcaaggtttacctcttcatactcagctaaaaattagctgatgagatgcacaaataattccagtgtatcaggagaggatcagcttcctcccttttaaggtaacatggatcctttcaccatctcctgatgccctgagaccaatgtcttgagagcatcacatcttgtttcatgcattctgactgggcatgctcatctattccagtgttcccaagaaacactcatgtattgatcactccgtggccaggccagatctctctctggcttgtcactgagtggacattttttttttgatttctcaaagtcacctcaaattcagtgtgcccagactagaactcatcttccctaccatgtctgcgtctcctcctgcattctctgtttcagtgataagtaacttggggggcatttttgattctccttccctcttttccaccccaaatggaacttgttgttaggatctgtggattctatcactcttgattccacctacttttcaccattttgcctctacttctctggtgcaggtcttcaccatctcttgcttaattgctgctacagtgtcctaactaatttccctgcctttagtctgtctgtccatctctaatccactttccatatggcagtgagaatgtttattcttgccacttcttagatctaaaactctttagtagctctccattgctctcagaattgagagtccttattatgacttaaaaattattaattatctggtgcttgctcaccttccaaggatcttcttttcaccttgaactggatgcattttccgtatgtaccattttctctgtaggttctaagcctttgaagaggtgatgcctctgcttggagtgtctttccattctcccatttgcctagttcttattctttttttatttgctaagacactacctctgaatagatgacttccttgaccctgcctctctcaagggtgagttacatgccctcttcttatccttagtgttaaaattaccacactgaccttcagttccctctttacttgtttatcttcctcagtagctccttaagaagggattatcttcttcactctgcccttagcatcaagcctgatgtctctattatagtctgtgctaaataattattaataaacaaaatacccagttagtgtaaggaaaggaacctgccatggtaaataagtgtgagagaggttttgaggtagtcgtataactgttagaaatacacaaatcacattatagatagtggcttctctgtttatcacagtgctcagtttcttgttccaggatatttagaaaaagtatacctaaaataagcggagaagtcattaggttgaatgacatattcccttctgccgaggtattataatataatttttaaagggcctcagttaacaattaaattctttatatccttgcagcagttctttttttctaggtttcatttccttccagaactagatgaggatttttgtctaactgatacaattccacgttctgagtccttgccttctctctctttcagtttctgggttgtatgtggtagattgcccagtctatacctaatcagcactaggttggagaagaataaactgccttcatgttgtggagctggcagtcttctctgttgagtgataaaccaatgccattctaaaagatctgcagacctgtgtgatctcttcttcgagggagctgtaagaactaactttgatggaaacaccagttttaaaagattgcagttcatttcctacatgcatatttgcctagggaaattttgtaacatcaactgaagtttactaaatgaacagcaaatgaataagtatacgggttgatgacaaacactccagcccaacatctctagggcctttgccaatgtttcactagaattttggaccctcaaggtcatcttagttttaccatgttctcctgatttgtgttgtatggggtcatcctctttagcaatctgcagagcataattttaatgctgtctcccaggtggagggttgatgatccctttatagaccacattctagcacaaattaatgtcactgtttcttctgtaggaggagcctggcacactgaataccagtggagtcttgctctctaggcttatcttgggagctagtatgcttattcttgtttctgtccctttccttatgcactgccacaaaggaattgctctagaatccatttcttcttcctcatctcctccgtttctttgaatcttattttgtaaagttcaagcttcatttcctgcaattagggaatagatcatggtctctaggtgctttgtcattctcaatactgtgtgccattcttttgaattacttcatgttcctttggagcagaggttgtatcttttactttatatggaaaagtatggcttagtgcagcgtgtaactcagactaaggcaatttaaatgctgtatttcatttgaaatgacacatggagctgtttttaccacatttctcactgtcttatctgaaaaccagattagcgcagggaagtcttggagctattaaaaccttctcctcatattttctctggctttcagaatgactatatagggccttttctttggtggggattacacctcactggctctcatgtaaccagtcaattttcctctcacttattatgggactgtgaaagaaagaattagaaggtgaaattataggattaatgttaaaaggaattagttagcttctttgttcctttaatttccagttacaagaaaagaattagatcaattacatttctatgggcttgatctcatgtaatagtagctattaccaacaaaaatataaccaaattggacttttaagaatgttcacagcagcattgtttataatggcaaaacattagtatcaacacaggtgtccaaccacaggaaaacagttagataaaatgtaattaaatccttatgataaaatgtgaccattaaagttgctgtttttgaagaatttttaatgtgtgaaaatgtgaaaatgtgctgatggtatcatcagcacctagtaccagtgcctggcatgtgaaaacagcttccaataaatacatatgtaatagctttatcataccaggaaaggtggctatagaaaataatagtaacctcgtactaaaatgaagagaacatcaacttcctctctgctagatggccactatctgcatcttttattctcttgagtattctggaatcagtaaaaatggtgttttcaaagaatcttatcagaaattcagctacatctttgcttggcaatctgaagtttttggaaagaacgtatttcaataataaagaatgacatagaaatttttacatggtaaatatttaaataaaatatgacattttaaatttaagtccagggttactgtttcagagctgaattcagacatctgaatgataagcggagatttcattgagaaaatctctactttatcattcctactggctttactatgtcatggagagctcaaaatgtcatcactgaattagttttctagctgacttcctcctggtggtgttttatatgttagtgacattgatttctggacttttctttttcccataggtcttacctcatttatttgaaatagaattgattaaaataacctatagaaataaaaagcaaaataaaacaatagagataaagatgaaaaatgtggtataatttttaaaaattaccattctaggtatatagtcataattatgaaatattattctggtctgaatgatacaaactgctcagcttttatgctttagaagatatcattattaataactaatttattagatttgaacattcaagagcaaagagatgttacaccaacgggttcccttgtctcctactttctagtttatgtaactgtaaatgagtaccctagattatcagttgctttttggggatatgttttgttatgataaaaagaagcagttcgatcatgacatttgcagttatctttcttgcagtgaccttctagaaatgactcttcaccttcctatctctttccctgtcttggttcatggtatactcattctttcaattgtgaaagtagaaagtcagctgactctttgattcttctgtctccctctgaaccactgacttatggcaatttccctttagcatgtgttccgtatctggaccttcatgttcagtctcactgtctctcccctggttcaagttctcagataaaaaccgtttgcctttagtcttcccaagcctttagtcttccccatttcaattcatctcctgtactatcataagataaatattgattttgctctttttgtttctgcttccagctttattaagatgtaaatgacaaataaatattgtgtatactgatggtataaacgtgatgttgtaatacatgtatacattgtgaaatgattaaaccaagcaaatcaatatattcatcatcttacatatgtataacttttttgtggtaagaacatttgagatctactcttttagcagtttttaagtgtccaatacattttattaattgcagtcaccatggtgtacaatagatccctagttctggagattttgctattttcttgcccaaaaattgttagtagctattaccaacaaaaatataaccaaattggtcttttaagaatgttcacagcagcattgtttataatggcaaaacattagtatcaacacaggtgtccaaccacaggaaaacagttagataaaatgtaattaaatccctatgataaaatgtgaccattaaagttgctgtttttgaagaatttttaatgtgtgaaaatgtggaatgtagcagagcctaataccatataaatacaaaatacaagaaacatttatgttgttttttgtatttttttgagacagagtcttgctctgttgcccaggctggagtgcagtggcacgatttcggctcactgcaacctctgcctcccgggttcaagcgattctcctacctcggcctcccgagtagctgggactacaggcatgtgccaccacgcccagctaattttttaaaatatttttagtagagatgggtttcaccatgttggccaggctggtcttgaactcctgacttcaggtgatccgcccgcctcggcctcccaaagtgctggaattacaggtgtgagccaccgcgcccggccaagaaatatttatgtatatatgaatgttagcagtggttatttctgagtggctcaataacagcagatttttctttttgcctacacttttcaatttttctacaataaattgcattgtttttataatcagaaaaacttcctctaatgattggtatctgtaagaaagcttgtaagttatttagtttagttggtcttaatatatttttggatcatgggcctctttgaggatctgacaaatgacatggaacttctctcagaaaaatgaacatctgcccatagacacaaaatatggcatagaacttcagtaggattttgggcctcagatcaaagagctttttgatagtaagcacaatgctctcatttaagagatgatggtggacccagaggatctgcctgctctcccacaggaggctgggagcagaggcaaaactaattcttagtactttaagcttttgccttgaaactaggctgtccaggagacttgagatcactttgcaatgcccttcattatgtgctactgaggtaccttctgtaagttgctaagcctgtgaggtagccgtccacacccgaagagggtcctccctatggtggttactaatgttattctttgtagtagtgccaaagcttttccttttggtaaagataagcttttattggagagacctaggggagtggcttctaagtcagtggtgggtcctagaagtaagcaaataaaatgtgcgcctcccattactgaattttgtatctattactttcttaaacatttcctctcagatttgatgattttgttgtaaacaggcatgatgaaggctttttttcttgagaatgtttgttttcttccatcatctggcagttttccttatatgaccttgactatggtggtaacaggaatgaggcatctgtctgctctagaatttttcattgtgcttggtgctgtagcggttctctctacctggtgcctgcacagcctgcatgattagggcttggaaaggtctcatttcctctggttttaagtgattttgttctttcatagccttaagttagctagtaagtgagggaaaagtaccactaccagcaccccagagccagcctttgactgggaatgaacgtggaagagtgccctttctttgtcagaaactcctacagcgccctgataaatcttgccacagacagcagattttacaaataaaggagaagtgttttctttggtgcaaaaaagacagcaaacacagatctggaaacagctgtctgatactttttttgcaagttgttaagccctctacagtctaatctctgtggagagccctgaatcaaaacagaggattgaatccctgaattgagcagaggaattgtggaaaaggtaaggaaatgaacttttttgatgcctccaagtaccagcactggccaaggtgctttcatagatgtaatattgaatcctaggaaaaccctgtgaagtaggtggtggtggtcttatttttacaggtgaggaaactgaagcccaaagcgtattttgctgaagtatacagttagagacaaaactgagtatgtctgcttccagtcaagctctttctcatctataacaaataggttgtatgacagcacatggttttgaagtgctctaattatcttttatgtgtatgtgtttcaaatatttttatttatatactatgatctcattaataaaattagaaaatacagaaagatataaacacacacacaaccctcacatgaaacagttctactccaaccacagccgcttgtagaccctgatagataataactggccctgatgaagatttcctctcctctctcatctctttgcttatatgctgttgtatattttccaatcctttcctcccaatcatatttctaatgtaaatgtaacggaaacacacggacagttttacgtccttattctatatgtattggcgataactttttgcatagcgcttcattctgcacatagtttagtgttcccccactgtcatcttcataagatctgcctgatgagaggaaaagcagaaagagcaccatagtccctgaacaatctgggcagaaacacatgggtttgggataatacacgtgcacttttcttcactcctctacatctgctcaagatgaaaatggttgggacattatcattttgtccatagcacaggagaacatagttaagtcatttggttgagcctggaatgcaagagaaaatgtgtctactgacattctatttccacttcaccgatagccctgagaagacagaaagatgggtataacttgggtgtcttcctcctgctctcttagaaataaactcttgaaacttattgactagattgtatatccacctagaattgggccagagtgaagactaatgcctacagtatgcacacccatgtttgggtgctgtcagagctcaggaaacagaagcctggagattgcctagtctcctgccctttgcagattaccagcaagcatcctctcaggcacagactgcccaagggtgaagcagcagcagcctggagaagctgccaatggtaataggatgccaagaaagaaaagtgagcaaattagaaagatgcccaccagcacttatctatttggaacccaatcttttctttctctacaaaaattttagattgccagactcttgaacttcaaggtttccttctttataaaaattatattaaaaaagtactctcattccactatctatgtctctccagagcctgctttcatggggctttccaatatcctgctgtggggaagcaaactgtttgcacttcttgcaagagatttaacttatttaatcagtttccctctctctctttctcccttgcatttactgatgataagattgtgttcagggtagaaatttggctgcctgtttgagtgacaacagcggacccagcccttgtaaatgtctgctccttcttcccgctgcatctagtttcctgccttctgccaggtctcagcaagccctgtgaggcaaagcaccttcttccttctactgtggacagctgcttctcccaagctgtctgccatctcaggagggaccaacgctctttgcagttctgtagcttctgtcctgttcttgtgaacttatgttcactaatgtaaatggggctttatgtctttattgactttgtagtgaatacaattgtcagagaggctgcttcaaagaatcaccttgctctcctctgccctgactcggggctcagcttggcaggaggtgtgatgtctcagagcaagtacagcattttttgaaggagcaaggtgttaatggcaggtgactctggccccttttatgtgcttgagctgttttgccaggtacagagtgggagtggaacagaaaaagggttttttctagtctagggtcccaccagctaaggcctcctgattgagccatctgtaatcccagggtggaccttgaggcagcctataaatcattctctgctctgccactgtgtcaggttaaggcttggaattaaggttccaagagaggtaaaaggtaaaaccaagagctcatcagacagcctgaccacaaatttccctctccattgtgctcctgtgggtgaggtctcctagccaaatgactttccttatcttgaggaccaggcccagtatctgcttatccctgaggagtgggttttggttccctcacagcctgtggaattattcaaacaagccagtcacatcctcttgtggggaccagggctaccttgcccttctgttacttcaaaaccagcctcacataggccctgcctgttcacctttcctgagtgtggcccctgtgtggcctgtgtggggtgcattgtcctcccctgggctgtgagtagatatgactagcgaactgctattaatctcctctgttaaggttgagtgtcatgtggttggccatccccatatttctagggtgggaactcctccctcaccaatggggtaaagaagacactgcattcagcttttctagcctcctagcatgtataactatatttccacttttcaaccacttgccctctctcgtgtaatacactacaaagagaaggaaacatgcctgtaattttcatcatgatatccttggtgtccagcacagtgttccctggcacttgataaatatctgttggataaatgaatgagtgaattccaagggttctttctgagtaaagattccactaaatagtttctcctctcacttgcaaaatgttgtcactccataatcagggatggaatgaggggtgtgagcagggtgtgcacgtcacctctaacttctccaggttcttccaacctcagaggtgtcccaagcaagccaaagagaataacagatccttaggatgtatcccacacccccagttcagtgccatctcagtgttagattgatgtacttttcttgagataaacattgacagatgtcgctgaatttggcaaccaactgtacttcacatcttctgagacattctagtccacttacccagtacatgtgaaaggactttagtgcctccctcttttgttctctgggctatcttctccaattctgatttgttgatgtagatggctgttaccagcaacaatgagagcgtggggcctggggaggcagagagctttcattctagtgtttttgtgattgttttggctatagctaggccaaggtactgtcctattctgtttgtattgcagtcaaattaatcaacaggcatttttttctcagccatcttcaagtcgtgtcaggaaaaatttggcctacatgaggtttaggaaactatcttttatttccctttattttcatgaacatttgagcttgaggagaatgtgagcatttttcagatcattgggtcttatagtttcaggcttcatattttgtgcattcccacttctaaagctttgttttcatatatttgcccattcctccaatctaagtctcaccatttaaaaagttaagttcacatctggtttctggggaattgttgcctcatttatctttttgtctccttttcagaaatcccttttagtttattatttattttattatttttattttagtttattattttttcacatgtagtgtcactggtatttattatttttagtttattattttttcacatgtagtgatattatttttatttagtttattattttttcacatgtagtgtcactggtattaattttactaatttttgcttctcaaagccaaggactttgaggaattttcttttctttccagggtgccttatacagtgctctgctcataataggtgtttatttttcataataggttttcattgcttgattttttgatagcaggaaccaggtaggtatgcctctataagggtgaatgttgttcataggagacaaaataacaaaactggtgtcagtttgtttgagcttacattaaacgggttcacaaggcctcctgagctctgtgtattgaagcaacagaaaccatgaagcattttattgcaagagcaatcaggcaacttcccagatgttgctaaactctgctttaactgttgtgtagagctagttttaactgcatctcccactgctactggagacaatgattctagagatgttactaattgtcacttgttctttgcctagatttcttctctgctccttgtggcgtcacccagccgctagacgggcaatggattagaatttacatggaggctgtggtcacggttgtctcaggtgttaaggaacaaagaaaaagaggtgcagaaagaataaatcaaatcattattttaaaatgtcttagtttccaaccaggcaatggaatttaagggagattccctgacggttaccctaagacatctgctttggagcccttagcagaactctctctgtgggatgattggtcctaagcctcattaacagaggctttgcggctccattggaggttggtgcagcacaggtgggcgttagcacagaggtttataggaccaaacccacttcagcaaccagcactaattggctccccagggaagtcccatgagaagctgtcaatcgtgaagactgagtttttgtttataatatgtagtgatttctcctttgctgctctttttcctcccctatccaaactgcctttccttcttgcacaaataggtggtggttcccaaagtacagataattagaaagttgaggcaaaccttactttgattccaactgcatttttctccactctctattctccctaacccttcccctatccccacccttagtgtgaaacaataccctgtcatatgggaggaaccctcgctgaggttgtgctgacaaagctagaaagtagtgttgaaaaataaatgtacatcatcagtgcattttatgaagtgatttctagtttctgtaatgtgacttcaattatgctgaaaatggagatcttagtctcatcacgtacttttgttaaatcattgtattttaaggttaagtcacagggcaggaaacaccttctctgcaggatattgggtgtaaaataaagagaggctttctgtgtcctgggaatgttctgctaagaagacagtgatgataatagttaccactgaataagtactgacatgtgaggaactaccaggatccctgctttacaggaagaagccgaggctcagaagtacacttgtctaaggtcccagaacaagtgtaagtgtcaggatttgaacttaagtttgcctgattccaaaagtttctgttcttaaaagctgtgttttgctcatgttttgatttatgtttgcccaaggtcttttggtccaactacaaaaataatttaaattagttatcagaccaagcattctttccagtgtttgagggacgggagcaactcaggtgtagttgactaaccattctacattggtgttatttcgtggggtcaatttcagggccgtaattcagtcatagttattgccaaatccaggtgatagtaggctttgtgggtggtgagggtagattagaaggactttagcttgcttataatctcccctgttctttcttacgctgaggtagaaggttggtgaagagactagaaagacttgggggtaagttctcaagtattacacaaactgaaatttggttctgtcaactgcctagttatgggacatgattagtgccaacaggtcacagggggatttcacttcctctggtcaatatgatgcaggatacagggttgggggatgttcaaggaaataacaaactgcagaaacatcatttttatctgtttcatgcacacttgtggcccaggagattggtaatttcttctttctgataatacttaattgaagagacttttatttttgactagtacttacaggaggacttaagcccgatcaatgcaaattgatttttttaaaaaatcattaaaatttaaaccttgggcattatctttaggttgtaagtgctaaactcagcccacctctttctttcattatgagcaaaagtaatcaaagaccatcagtgctaattaattcagataagccaaaaacatacatattcttattttaaatgaaagaaatgttagtgttgtgattgtttttatattattttaattaaaagttaaatggaatagaaaggtaccaatttaattacatattgaaattcctctaaagccttctcagaagtacttccttttagttgcagattacaaaaagagatgtagggggaagatataagggagaaggagaatcagttcaaattgttttcaggtctgatttggcgtaggaaaattgattctgaaaatctaagtttggaaaattaactaaagcaactcttctcaaacataacctggtcagtgattaccatccaaacattcaaggttgtttctaatttgatcaagaaatggtatggaacaatgcacatgtaatctaaaccatattttagctgtaatttttaccttctcctattgtatcctatgttcaataaaataaatatctctagcaaagaattcaatataataatgtttccagtcttccttcatttttatgtcttcccatagggtagacaaaattccagtaaacaataaaatgatcaaaatatgagaaaaataaggagaatgagagacagtctctgggtggcatataaacaggatggccatcctctgactcacaggctgtcttgtaaggttggcaatgactttgaaattttatcaagtctatctcttttccttttggcaagactattcttatacctttcccagtagatgttaatctatcctgtttttaaatgaaacttctagtacagaagacacatggtcccttaggaactcattgtgaaattagagggttttcagagaaggactctgttgtttattttgattgttcatcttctccatagggatgatcaactttatataaacagcgctgcatccatgtaaagtcattttacatggcacttgagcagattgacagatatttagagaacatgaccgccttagggaacaattagttcagtcccttaattgtgactggttggtcttctctcttccagattgagattataagtttcttttattataaattcatgttgtgttgttgacttatattcactttagaccttcatattttttgcctactctttgcattgctagtattcccctgctctgtgttaaaatatgctggttctgtcagttaatatccaaaatatgtgatttttttaaaaaataaaaagtgtgacagggtctatgatgtataggacataggattagcatggatatgactcagtatcctgggctccaaccatgattctgtcacagctactggtatgactttgggcgggtaatttactgagctcagaggcctctgagcctcagtttatcactatcagatgtgtggccagattcagagcagctttttccaatgggttttccatgggatgttaacagatataacatgaaaaatggtcccatttaaaaataggtggtggtggttgggaggggatggggaggcaaagattaaatgaacctaaatagatttctttgctgaagcatgtgagtctttcacatattttggcttaaaaaaaaaagaattgtaaatcttcagatctttaagaggcgtttcctgaaagtatacaactatagttcctttttttttctctttttaatgctttagtgccgctaacccttgaccaggctcatctgcaaagcagaagtagccactttccttggtgcccatcccagaaatacagtaaaacacccaggaggtcactcagggctcttgactgtggatgagtttatgcattccacgtgtacctttctgcatcatgaactctttgagggcaggagcctttccttatttgccttgtgtaaagagggtctattcctgtgcttatacctggaagatgtgtagaatgagtcaaactgtccataagtggaaggcactgccttgaaagttttcagcttccctatcacagaaaatgttattatagagtgaatttttgaaatgagtggaaactgtagtcaagatgatatctatgatcaggaatctgtgagtttctaaggttataaagataacataagaataaaattactcatagataaccacaggtaggttaaaaaagggcagagtacagctttgcaggtggttcttactggcttctttctttggtctcgataaatttgcctattaccttgattctgtctgataatgtgaaattattaattggagaagtttgtccagattaccaatatatgaggaatggacaaaatgccacgacattttcttcatcgttcaccttgtacaatgccactgtgtacatacaaattcaattcattaaatttatgatgagtttgtttttctactttgctgttccattacctgttgtatttcttataagcttctggaaagcataaaatatgtcttatatacatttatttctccattgatacctagtgttttataattataggaagaactcaataaatgttgaaaaataaaaagatgactatagtggctcagacattttttccaatttagcatctgaagatagagatagtaaatatgatgagcttatatgtagcagaaattaatgttttgaaagtaggggaaaaaaccctatcatttcactaccaaagaatagccattgttaagacttcaggttatttctctctagacatatttcctgcaaagataatttttatgtatagttgtaatcatattgtatatataattttgtgtcctgatttttttcatttgaaactatgttatagaaagtgtttatgatagttatatttgctcttttgtatataggaaatatttttacaataaaatttttaaaatcatagaagtcttaagtaatatagttttcactaacagaatttttaattgtttctgcatggtttccttaaacatttattattttattattatgtttcttatgaggttttgccttcattatttatttatttatatgcaagagctggagtagacatttttaaacaggaatatttttatatttttccttttgaatattttcaaagcatcaaacacttattggcaaactgcttttcaaaagtatgtgtcaatatttgctatatcaaacaatgtatgaacattccaaattcattgcaagttcaccagcaaagaacattttttttactttttaaaatattgactgattttaatgggaaaatgctttattattttgtttaatttctgagggtattttttggtcttattactgaggtcaaatcttttctcatacttgtcatttttgttcttttgtgaatggtccatttatgtctttctatttatttttcttattgaattgtatgaatgcttcattccataaaacatgctatttcctgcagggactgtatattcacacaccactgcattgctgatgcccaaggatagtgtatgaaacagggtaaaatcaccatcggcaggcagctggagtagcttgttctgtggactgttttgcaatgcaataatgaggagggagctgagttactaaacagtcccctctttctgttagttcattattgcaaaagcaaggcctggcgagtgaggtgtgtgtggcaggcttcattcttccctttgtctcaactattattagataggtccagaaattgctggtacgttggggctgtgggcacatttggtttatgttgctttcctagatgttaagtgtcgcaacagctcgctatggtttgctcctcacttgagcaaattgataacagcttgtctgtgactccttaagaataatgagaatcaacctcattttaggagaggggacagattgtgtctgtacttggcatccttctgcagacatccttctgcagctgggattgcttgagacacttcacagagttgaggactcatattgacagagaaatgtccattttgtctgaggagctgctgaatctgtcagcatctactggcagaagtgctttctctagcatgacttcacctctcaaatccctggatgtaacaaaagtcaatataagatctctgcagtctatttcagtcctttgtcattttatcagataactaaatgctaaatgccttcagatacatcataagctaagggctcctttgaaaacaggacagacactttacaaactacatcaaagcatgcagatagttttatttttaatactttttttgtcttgcatgaaatacttgaaaatagttcagatatcgccgctgccacaaaaattgtcctatagcaaagaaaataatagctcttttaccttaatagcgaaagttttgtgtagaaatgatttgaggatagaagaggtttttccaaatatgattttgttgtgttttcttttttctctttctctctttcttttcttttctttctttctttctttctttctttctttctctttctttctttcattcattctttctttctttctttttctttctttgactctataataacttcttattacatgcagaagtaaatcttaattctttttggccatcttttctgtgtgaattttattttattttaaaaatagctttattgagatatccttgacatatacaaattgtatatatttaaagtgtacaacttgatgttttattctatgtatttattatgaaatgattacattccagctaattaacatatctatcacttctacatagttaccatgtgggtgcatgtgtgtatgtgtgtgtagatatacgtatgtgaaattcaacatgaattttggattctataatattgttaaacactttagaaataaactttcttgtctctacctcagtatgtttgcacatacattcttcccaagaagcaaacccattcttgtttgtcagtggaggctttacttctttcgacatttgcctcctcaattttcttcttcagttctgtctcctccacatgatgtcagctcacatattcaaaatatgttgccttacaaatcctcttgggtatgtctatgtattatttccttaaggtaggactaattttacattctttatgttttccagtgtgttgactagaaattttttttatgcaatgtgtttctaataaatgcagttgtttgattctctttcgttctaaaacattcatgagattcaaattgtgatcatatttccaggtaattgaaggacacatgagtttagggttattgatttcatattttaaacaaaatcacaaattaaggatttataaaataaaatagattgtgattatattttttgtttgtcccttaatctttaaataaataagtggtttcacaaaattttcttttaaagatattttaaaacctctgatgaggccatgcttaaaaataattaaacccattataaagtagtggtactgatggtgatgtttgaagtaatatctttgagtttggggattatgtgattttggaactctgcatgtagaccaacttctggcaacagtttggaatagagaggacaactttggccacctggagcaacagcaaaatctgatggtgataactctcaagagagtccatataaggcttagtaaagatacatggaggaattgtatgcatctgatttttatttgtaaaattaaattctgagattccaaatgcaatactgaaattgtgagctctttctttgacaacaaatgtgtccagggagatgatgagcttgttaaacatcaaggttataattcaaatgacaccatcaagttgaagaaatgtaaaaagatatacagacacaatgtttgaggaatcatttgccagtgttacattggaaaatatgttgcatagtgttttcttaagcttattcctttgttgttgttgttgttgttgttgtggagatagagtctcactatgtttcccaggctggtctcaaactcctggagctaagtgatcttcccaccttggattaaaggtgtgagccactgcacctggccatacttacttttgagtagttggtgataatgatgatgttgatagagagtaattaagtatgaatgagttatttacttcttataacaatatactatgttatacttatgtccatttataaatgggaaaattgaggctcatagagaagatgtgagttgccctaggttatatagctagtaagctgcagttaggatttgaacccacttctcactgagtccaaagaccaatattttgagatactgaaaagttttttaggatataataaatgagtcatgaatagttactgtgacatataaaagagggattccttgtgtattctgagaagttccaatgagttagtagtgttggtcaagtcgcctcttggtataatgttaacatttctggttaaaccctgaactctgcagccatcaagaaattatagcccaagaacaaagggatcataggtagtctcccacatagtgatgtctgtcctttgacaaacatcagtgtcttcactttgacaatggtacgttttcttttgcttatcatccctggttaaatctttttctaatctcagctgaatgggttgaacaatgatagtcattttcatcccttgatatgaagagatggttactaaactcaaagcaagaaaaagtgtaaatatgacacttctgagccggggaagcaaagtgtaaactgaggcagcagtattcttctttatgaagtatttaagccatgatgctatttttcagtgtatttgctatgagaatgagagtacttgctaatgaacactctcattgtatattaatagctgtattaattgagcatttattatatgccaggtacagcacttagggctaactgcatgctttctcatttaatttttacaatgaccttatgatgtatataccattaatattctcatgtcatagattagcaacctgaggcacagaaagggtaaatcactttctaagattacacattttattactggcttaatcagatgatgtctaagtatcatgatgacatagtctgcgctattaacaactctctcctgctttttgcactttaagcattctacatgatttttacacacgattttgctcatggtttacctagatgattttgaaactcaatcaagttatggctacaggattatatgaagggacaccataaaaaccctgtctattaattgctgttggctttgctttagcagaagacacattggattgggcatcagggcaaatggattctggcaaaagatatgctcttggaaccacttctttcagctattaagtggaatgaataatgcttcacttgcttaaaggcaggggctggacaagatagcatctttgactgaatatgaacagaacaacgtatttctaattgtgttctttaggggccagggttgctggcataagcatgaattgagcatcttaaaaggtgtcatgaaaccatgaaggaaagaaatctcttgcctcttggtataatgtgaacatctctgattgaaccctggactctgcagccaacaagggactacagcccaagaacaaagggatcataagtagtctcccacatagcaatgcctctcctttgagaaacatcagtgtcttcactttgacagtgctacattatcttttggttatcatccctagctaaaaataattttagaagggcatagaaagaagaggtatatctaagatactctcttctaagtaccaaggttgattgatgattcttttcagaaacaagaaactttcttaaagtataatatgttgatggctttgttgagttagcaatttatcacaccacatagttctgtgggtaatttatcattgaatcaggttccctttactctgtcccaatattataggttaatctgggacatgtagtttctgaaataccgacagtcccattttgaattattattttagaagctgtgaagacatttagctccttttgatttcatactcttgactttagtactcattgtagacatgagaagtatgtggcattgtgtgagcatctgtaaagattgtaaatgatattaattaagttggctgtgctttttctcctcacaatggattcttttgttaggctggtaataatcgcgtttttggtaaaaacacctcatggaatttttttcctttctcataaaatagctgtttactgtaaaattgagatagcctctcaagtctggaacacctttcaattcatcaaaaagggacaacctaatattccaaagaagactcaatccttttaacacacatacattttagggccagtcaagagaagtggcctgttctgtaggaaaacatttcttggcacattattattttaagtgattgcaggagaccacagagggagagaaaagagacaacaacaacttctagcatgcctgggggatgacttgctctttcatatttgtggaaccctatgtcaagagagaaaacatctaaaaataaaaacgcatttactcagattctctagggcaaggtgcaaagagcctgtgctgtaggagctcagatcaaaaattaaatggttgaaacctgcagagcaactgccgtcagcagaaccgtgggctccttctggttgattttgtgccattcagttagtttccataaattggccttgggtactgatgttctttggtcttttttgtgctgtccataactaatagtgaccgttgctggtaaattgtttcttcagtccagtgattattggcctttcaaagcattgacttcctccaccaatgtatacagtcaccaaatgggatctggtttgttcaacattctagtcaagttccaagtggtaggaatcaaaattccactctagtttatgtgtattattcctatagctcttccctcgagatgtggcatgggatggaaaatggagcctatgtgtggtataggcactacttaaaatttatcaatagagagggatccatgaggaggaggaaacaagccaaagagattgggcaggctaattttcttctagacagttcctgctctcttggattttactccaattccccactctttccataggagtaaaagtcttaaaacttgaactaatgttgaattttaatcctgaatggtgtagcatccttcatttctatccgtctcattatcagcccatacccctgccattgccactaccatattttcaaatgtctttcaactctccaaaacctactgaccctagtttatcatgcatttgaaaggctccccactttttgtagaacttcaggtattttaaaacatatttagaaagactctaaataaactggagtgagtctatagctaatgtttgaccaaaaaaaaaaaaaaaagtaaaaaagtgtgctgtgaaattttgaatattaattgtgccaattggaatggcatttttaaaaagaaactatttcatccataaatgataaatatatatttctttgtttaaaaagtacattaatgcaaaattctccacccccatgtatttttagcttacatatccatctaacctaaatacagtcatgcatcacttaatgagaggcatacaatctgagaaatatatcattaggcaattttgtcattgtgcaaacattgtagagtgtacttagatacacctgggtggtatagcttagtatacacctaggttatatggtatattctattgctcctagactacaaacctgtacagcttgctactgcactgaacactgtgggcaattgtaacacaatggcaagcatttttgtatctaagcatatgtaaacacagaaaaagcacagtaaaaatacaaaataaaagaggaaaaaaagtgacctctgtataggacacttaccatgaatgaagcttgcaggagtagaagctgctctgagtgagtgagtggtgaatgaatataaaggcccagaacattactatacactactatagactttataaacactgtacacttaacggtacactaaatttacaaaaatatcttttttaccattcggcccagcaatcctattactgagtatatacccaaaggaatataaatcattctattatatcataaagacacaggtagtcatatgttcattgtagcactattcataatagcaaagatatggaatcaacctaaatgcccatcgataatagtagattggataaataaaaagtggtacatatacaccatggaatactatgcagccatacaaaagaatgagatcatgtcctttgcgggaatatagatggagctggaagccattatccttaacaaactaatgcagaaacggaaaaccaaatactgcatgttctcacttacaagtgggagctaaatgatgagaacacatggactcatagaggagaacaacaaacactggggccgactagaagatggacagtgggaagggggagaggatcaggaaaataaccagcaggtaccaggcttaatgcctggtgatgaaataatctgtacaccaaacccccatgacatgagtctacttatataacaaacctgcacatgtacccctaaacttaaaagttaagaaaatttctttcttcaataaaaaattaatagctaatttttatctttaacaattttgactcctgtaataacactacttaaaacgtaaagcaccatatagctgtacaaaaatatttcctttctctttcctttctctgtatccttattatataagcttcttattaaaaaatgtctagttatctcttttattttttgaacttttttcttaacaactaagatacaaatacacatattagtctaggcctacatagagtcagtatcaacaatatcactgtctttcaccttcataccctgtcttactgaagattttcaggggcaataacatgcaaggagctgccatcgtctctgatgaccatgccttcttatggaatacctcttgatatgcctacctgaggctgttttacagttaactatttttttaataagtagaaggaccacactctaaagtaatgataaaaagtatagtaaacacataaattagtaaccattatttgttattgttatcatgtattatgtagtacacataattgtgtgtgctctaatttatatgaatgacagcacagtaggttttttatgccaacattgctacaaacatataagtactgctttccattatgacattactatgcctatggtatattaataactaggctataggaatttttcagcttcgttataatctaatgggaccactgtagtatgtggtccattgttgacctaaatgtcattatatggcacatgattatacttgaaaataatcaaagttatcagatagagaaggcttagggatgcagaaccatctttacaagtttttgctgctttgagacaaatccaaccccgactattaccagcttagagacacctcctagctgcctctagagatgtatatcatctttgatcagggactggggacctaaaacaggaacaatagcatagcatgcttttatgtgcaatgaattttcaaatattaaaaaaaaccttcaatattgttgttatattatctgcacagtattaggaaaaatgagtaataacttataagtgaaaaaatacctatgctgcaaaaaactcttttaatgttgactccagtttcagcagaataaatttgtctgatgatagccccagtgtctacagaaaatatacattttctattactggggttacagtgtatgtagaagcactgtgagaaaccttgacattttggcagaaaaggatttttaacaataaaattcaagaaaaggtcatattagtagaaattttggtagtcattttaaatgtctcccacattatatggcatcataaatgcatttaatatcagattgaattatggctgtaatctttagccttagtagtctgaacatcatttcatacctagcttaatatcctggaatgttatgtgtggtttctgctttatttaaaatagaggagtgacaagggtgatgaatacattttatttctgttttctcatcccattttctattgcaaatgaattttttttcagaagtaggtatgcctacctgtatctttgcaaaatgcattttcagaaaataggtttggaatattcatttaaatcctatttcttgtgacccaatgtaaactcactgctgttaaatctaaagtgtgtgagttcttacagctgagcagtaattctactgacattttaatgtcatgtcctctccttagcagcctgtttgcatattgcatgcaggctacatgttaggattttttaaaacatgaggtgtcttggaaaatgattttgacacaacttgtcctcttggaccaactgtattttataaacattttaatgctttactcttgaatgatccatttcactaagagtcagaaaactgagtttctgtcatgccatggtgacatgatgctgacattgctgagctagttacttattccttttacctaaatgtttaatagaacacacccagccctgtgtgggcatgagagggaaatgggcccagaagttgcagtggttgcattcacaagccattaagctgtggtcagtttctccctaaagcattgtacctcccttagacaacttcctctttggggagttgcaatatctagaaacttcagaggaaggggtccagctgcagggatatggttaaaagttttttcagaggagccactttgcatggcagtgggccatttcctgctatcactcaggcccagcctacccacaagttacagtctttggcaagaaacagaaggaaacagtggtggctcttggagccacatgctcaatttttgatggtgctctttgcgcagtgaatgccagctgctcctcaatcaggtatgctgctgttgttctgagagtgattaggaacaaaagggatgatgcagatgtgtcaggctatgggaagtgcaaatgtatatttttggagcactgaatgtaaagagatttagaagtttcctgttggaaagcaggctatcgaagcaggcaggcaaaatgattttgacaccaataccaaccaagggcaagaagtggaagcttggaaatatacttgtttgggaataagaaattgataagacaaatatactttttaaaaagaaagataagagaggtcatgaaagaattgtgaaggtccagtctgtcctatttcctttgctaccacctgagtctgttaccatggtctcactcttgcatgaaagcagtcatctcctacctaagccccttctgttcatcttgctccttggaggctggcctccacatccttgaaaatacaagtctgattttgcctctcctctgcccaaacctgccaacagcttcccaactcatgaggagtgagatcaaatgtcttgccatggctgacatggcattcttgggcctggccctgaccttctctgtccttatcttgcaccactcttactgtcactcgctcccttcaggtccctctgtttccttgctgctcttttatatgccatccctcctcagggcctttccaccttcatttctgattagaatattcttcccccagatatccgtattacacactttctcactccattatcatctgttcaaatagcacttaaaaagagaggttctgtggccatgctatctaaaatagcacactcacatgcacccatgactttctctccacttaccctatcttcttcacagcacgtagcaccacctgtcatattctatcaagttgaaccatatgaaattgcttttgggtggatcaagaacagctgaatattggccatttcatttggttcaaactaaaatatatttattaatttgtttattatttgtatttcttctatactatgattgaaaccctgtgggtcaaaggttttgttttgtttttggcaacatctccaatgtctagagcacagcaggaacttagacaagttgtattgaattaatggaaaggaagaagaaaagccatataacttgttgacagtaagcagtgaacacttatatgaaaaatgatctctctccctttctctgtctctgtcttgtgtgtgtgtgtgagagagagggagaggagagagaggaagcactagaggactctagaaaaaggtgatgggatgggcttcagagggaatccagaaaattaaaggatttatttggatccatgtaaagttcagtgtaatgtttctagttgtagctaggggctatgtatgcacctataattattatatatttttttccatgtggttttctgaaactgggaccaagtgggatcaaacaagctttggataatataattgtgaactgaaaaagtttcataattggtaaattacaaggattcagcttgccaattgtgctgtaagttgatttttactagagaaaataagttactttttactaacagttctagaaacatggctaataatcttactatcatccctgctacggatgcttagaaatactgcatgtctaatcttgaaaggaaataaaatcattactatgggtcagaagtaaaggttgaattgaaaactccagggataaacacttgaattgatactgtggctgcctttgggacagtattattagtctcactaacaaagggcttgagatatgaaatggaaaattgaggttctgtgggttggaacagagatcttcagtacaaagttgtgaccttggaatggaaaggactgaaaaaaaatcatcagaacagaagagacaaggaagctgtgtcttagaaaaagaatgtctccttcaaaaacacatctctatggatttgtacctcatttaggtttgggaattgaatttgtactacttgtgtagtatggaaaaatcacaacttgaaaaattaactacagagagcccagattactgatacttctaaagcacctggcagaatctgttacaaacttcttaggagaaagataccattcaaccaagtttcacaagattcctaaacataaatatcttctaaagattaactcacaacctcaaactataaaacataagaacaaaatcccccacaagtgagagttagcaaacacaaagagcaggattagaataagacctaaaagtgatggaactatcacatagactatgaaaaatgaatattgaaaatgatagagacataaatgaattataaatataagaaaaaataaggttaaaaaaagaacacactttataaaggtgaaaactaaagtaattgaaattaataatttatcataggttaaacaaattagatatagctggagagaaaattagtagactgtaatataatttgaagaaatcaaccagaaggcactgaaaagaaaatgatagaagatatgaaaaagaagttaagagacatgttggagagcataagattcaatatatgtttcataggccttctagaaggagagcacaggaagatttgggaagaggcagtatctgactataatgcaattaaattaataatttaaattaaaagacaacaaaaagaatcccacatggatttgaaattaaatcaacacacgtctaaacaactcatgagtcaagcaaaaaaataatgaaaattagaaaatatttaaaactgaatgttaatattaattaaattcatccattaaatattgtatgagaagcaatgaaagttatagttagaaagttatagctttaaatgcctatataagaaaatgaaaaaaggtacaaattaaaaaaaattaacttttaatttttttggctacatagtagatgtatatatttatggggtacatgagatattttgtacaggcatggggtacaggcatgcaatgtatcataatcacatggggtgtaaatggggtgtctgtcacctcaagcatttattttttgtgttacaaacaatccaattatactcttttagttatttaaaactgtacaattgaattatttttgactatagtcaccctgttgggctagcaaaccttaggtcttattcattctttctattttttttgtactcattaaccatccccacttccctccctcctccactacccttacaagcctatggtaaccatccctttaccatctatctccatgagttcaattgttttaatttttagctcccacaaataagtgaaaacatgcaaagtttgtctttctgtgtctggcttatttaacttaacacaatgacctctagttccatccacactgttgtaaataacagaatctcattctttttaatggtttaataatactccattttgtatatgtaacccgttttctttatccattaatctgctaatggattgctaccaattcctggctattgtgactagtgctacaataaacacgggagtgtagatatctctttgatatactgatttcctttcttttgggtatatacctaggagtgggattgctgggtcatatggtagtgctatttttaattttttgaggaacctccaaactgttctccacagtggttgtactaatttacattcccaccaacagcatacaagggttccattttcttcacatcctcgccagcatttgttgttgcctgtcttttggataaaagccattttaatgagagtgagatgatatctcattgtagttttgatatgcatttctcaatgatgttgagcaccttttcatatatctgttttccatttgtatgtcttcttttgagaattttttactcaactctttcacccatttttaaattagattattagatttaatagtgttgtttgtgctccttatatgttctggttattaatcccttatcagatggatagtttgcaaatattttctcccattctgtgggttttctctttgctttgttgactgtttcctttactgtgcagaagctttttaacttgatgtgatctcatttgtccacttctgttttggttgcctgtgcttgtggagcattactcaagaaatttttgcccagtccagtgtcctggagagtttccccaatgttttctttcagtagtttcatagtttgaggtcttagatttaagtctttcatccattttggttttgtatatggtgagagatagggattgggtttcactcttttgcatatggatatccagtttttccagcaccatttatagaagaaatcatcctttccctaatgtatgttcttggcattgttgttgaaaatgagttccctgtagatgtacggatttatttctaggttctgtattctattccactggtctatgtgtctgcctttatgccaataccatgctgtttttgttactatagctctatagtataatttggaagtcaggtaatgtgattcctccagttttgttccttttgattaggatagatttggctattctgggcattttgtgattccatataaattttaggattttttttctatttctgtaaagaatgtcatcagtattttgatagggagtgcattgaatctgtagattgctttggatagtatggacattttaacaatattcattcttccagtccatgaacatgggatatcgttccatctttttgtgtcctcttcaatttcttgcaccagtgttttatagttttcattgtagaaatctttcacttttttggttaatttctaggtattttatttaatttgtagctatcataaatggtactactttcttgatttctttttcagattgttcactcttggcatttagaaatgctactaatttttctatattgattttgtatcctgtaaatttactgaatttgcttaccagttctaatatttttttgagagagtctttaggtttttccaaatatgagatcatatcatctgcaaacaagggtaatttgactccttcctttctaattcggataccctgtgtttttttctcttgtcttactgatctagctaggactttcagtaccatgctgagtaacagtggtaaaaatgggcttccttatcatgttcctgatcttagagaaaaggctttcagtgtttcttcctttagtgtgatactaggtatatgtcttttgtatatggctttattgtgttgaggtatgttccttctatacataggtttttgaggatttttaccataaagggatgtgaaattttatcaaatgctttttcagcatcaattgaaatggtttttgttcttcattctgttgatatgatctatcacattgattgagttgcacatgttgaactatccttgcttccctgggataaaccccacttggtcatgaggaattatatttttaatgtgttgttgaatttggtttgttagtattttgttgaggatttttgtatcaatattcatcagtgatattggcctgcagttttcttttcttgatgtgtctttgtctggttttggtatcagggtaatactggcatcgtagaatgagtttggaagtatttcctcctctatttttcaaaatagtaacattgttattagttcttctttaaatgcctggtagaattcagcagtgaagccatcaggtacacagcctttctttactgcgagatttctttattatagttttgatcttgttgcttattattggtctgttcagggtttggatttgttcctggttcagccattgtaggttgtatgtgtctaggaatttgttcatttattccagattttttaatttactgggatttagttgctcatagtagccactaacgatcctttgaatttctacagtctcagttgtaatgtctcccttttcatctctattttatttatttgtgtcttctctcttttttcttaatctggctaaaggttaatctattttgtcttttcaagaagcaaactttttaatggatcttttgtattttccttgtttcaatttcatttatttctgctctgaactttattattttttcttctactagttttgggtttggtttgctcttgctttcctttcctagttctttaagacacactattgggtttttttatttgaagttttaattcttttttgatgtgggcacttaaaactataagtttcccttttagtactgcttttgctgtatcccataggttttggtatgttgtgtttccattatcatttgtttcaagaaattttataatttccctcttaatttcttcatgacccgttggtcattcaggagcatattgtttaatttctatgtgtctgtttagtttccaaaattcctcttgttttaatttctagttttcttccattgtggttggaggagatagttgatattatttcaaattttttgaatgttttaaaacttgttttgtgacctaacatgtggtctgtccttgagaatgatccatgtgctgaggaaaagaatgtgtattctgtgtattctgcagccattggatgaaatgtcctgtaaatatctatcgggatcatttggtctatagtgcatattaagtctgatgtttctttgttgattttctatatgggagatctgtcctatgacgaaagtgggctgttgaactctccagctgttattttcctgaggtctgtttctttatctctaataatatttgctttttatatctgggtgctccaatattggttacacctatttataattgttataccctcttcctgaattgaaccttttatcattatataatgaccttctttttcttttcttacagtttttgtgttgaagtctattttgtctaagtatagctactcctgctctttttgtttccattggcatggaatatctttttccacccttttagtttcagtctgtgtgtgtttataggtgaagtgtgtttattataggcaatgtatgtttgaaggatattagcaccagatatactattctagggtaaaagttttttctttatgccctgtaaatgtgtcatgtcactctctcctggtctttaaggtttcactgaaaagtctgctgacagacatattggagctccattgtgttatgtgtttcttttctcttgctgcttttaggattatttctttctccatagcttttgggagtttgattattaaacacctgcattagtcttcttcgggttaaatctgcttggtgttctataattttcttatacttggatattgatactcttttctaggtttgggaagttctttgttatgatccctttgaataaactttctacctcctcttcatggccaataactctaagatctgcccttttgaggctattttctagatcttgtaggcatgctttattcttttttattttgtcttctctgcctgtgtatttgcaaatagcctgtcttctagctcactaattttttcttctgctggatcaattctgctattaagagactccagctgggcacagcactttgggaggccaaggcggacagatcacctgagttcaggagtttgagaccagcctggccaacatggtgaaaccacgtctctactaaaaatacaaaaattagccaagtgtggtggcgtgtgcctgtaatcccagctacttgggaggctgaggcaggagaattgcttgaaccctggaggcagaggtggcagtgagctgagatcacaccactaccctccagcctgggtgacagagtaagactgcatctgaaaaaaaaaaaaaaaaaaaagagagagagagagagagactctgatgtattcttcagtatatcaattgcatttttcaactccagaatttctatttgattcttgttaattatttcaatctttttgtgaaatttatctgatattattctaaattccttctttgtattatcttgaatttctttgggttgactcaaaacagttattttgaattctctgtctgaaaggtcacatatatctgtttcccaggtttggtttctcatgccttaattagattgtttggtgaggtcatgttttgctggatggtcttaatgctcgttgatgtttgtcagtgtctggacattgaagagttaggtattgtcatcttcacagtctgggattcttcatacccattcttcttgggaagactttccaggtattcaaaagtacttgggtattatgatctaagccatatctgcatcgggggtaccacaaacctagtaatgctgtggttcttgcagaatcatagaggtactgccttggtattcttgcataagatccagaagaatcatctggattaccagggagagattattgttctcttccgttactttctcccaaacacagaatctctctctatgttgagctaaccacctagggctaggggtggggtgacagaagcgtgcctgttgcactgagactgcgttgggtcagacttgaagccagcatagcactgggtcttgtccaaggcctgctgtaaccactatctggcaaggccctagatacctggccgtacttaaggtactgttcacttaaggcccaaggactcttcagtcagcttgtggtgaatgcagccaagtctgagactcatcccttctggctcagggcaggtccagaaatgccattcaagagtcaagccttggaactggggaccccaagagtctgcttgttgccctaacccaccatagctgagctggtacctgatttttggttcttctgaaggtgtgatttttgcctagatagttgttacatttggtgttcctgtggggtggggggacaatcagtggggccttctattccaccatcttgctcccaaaggagtaaatattattaataataagatcagcatccaattcaagaacttagagagtaggcaaagcaaatataaagtataataaaagaaaaatgtgtgtattaataatatataaaacaaaactgaaagccctgaaaagactaataaataggttaacatggcatgtttgagtaaggaaaccactggaaacattacagctactagtatattggaaataatccctgtacatctggaacaagagaagaatgacttcgggttctgcttatgtttaattggttgttctagccagcattgtaggtaaaagaaataaataaaaggtagatagaaaagagagaaacctaattgttattagtaaagagacttcattgaaaaactattagaaaataatacaaaagttcaggaaaattgctagatataaagtaaaccacctttgtgtaacccagcaaaagacaattagaaaattctgtaaactacctttgtgtaacccagcaaaagacaattagaaaattcagtttaaaagcagataccatgaatacagcaaaaattagaaacatgtagtaataaatctaacaaaggatttttagaaatctttacaaataaaattacaaaattttaaggtaagacacaaagaagatgataaatagaaagatatactatacttaaagcagaatgactcagtatcagaaagatttcaattctttctgtattcatttataaattctaataagagctcacacaagagtggttttgttggttgttttcaggaacttgacaatctgatcaatctgattccaaaatgtatacaaagagctaagcgtcagtcataaccaacacaattttgaagaagtcgggaagattagccctaccacatgtcaacagctactgtaaaagtatagtgattaagacattgggatattggagcagcaataaataaatatactaggtttagaaatagactcatgtgtccctaaggatgtattacaaatcagtgtggtaaggatacaataaatgatgctaggagatataattattcacatggggaaataaaataataagtaccctttcttacaacatataataattaaatcccatgtggaatgtaggtgtaaaggtgaaaagaatagtaaagattttatgttttttagaagaaaatgtatgaaatatctttgtggccagtgggcagggaaggatttcttaagactaaaacccatttacgcctagtgttccattattggaatgctaagcatgtgagagttatttattatcctactgctcaagatcatcgccaaggcctgattgcaaaaattcaaaaaaattgcaacctcaggcataagtgggttaaaagacaaactataaagaaaaataataataggttgaatatattaaaacaaacatttttgaatagcaaataacaccaacaacatttttaaaaaacttcagaataggagatatttatagtatatacaaccaacaaaaattaatatgcattttgtatgaaggaatctttcaaataaatatttaaaaattcaatccaatggaaaaataggtgaaagatatgaacaaacaatcgacagaaaaaaatggctgataaacacacaaatatttgctttagctcactagtaatcaagtaaatgcaaattaaaaaaaggaaaattttatttcataccaaccagttttaagaattaaagtgtgaaagtgccaaataagaataaattggtaaaaccaattggaaaagtcagtttgactttacttagtaaagttaaacatttgcatatcttgaaggaggaattccacttctaggcatatatctagaaacatgattggatgtgtttgccaggggacatgcacaaggatgtttattctagcattattttgaaatagcatgatactcaaaaataaaattctgtatttctatcaacagaagaaagtacaaataaaaactgggatatttgtgcaatggacttacagcatagtagatgaaatgtataaattccatgagatacattaacatgggtaatgttaataaatttaataaacaacataatagcaacataaatttaagcaaaaacaaaaacaacttgcagagggattaatattatttgatgccatttctaggaagttttaggacattcaaaacaatattttatgtttttaaagaatacatccataggcagtaaaataattaaaagagggtggaaatcctaaacaccaattgtaggatttttctgtgaagggaggtagggaaggaggtaaatgggctcagagagggaaggatacactgggctttcaaatctaacggaattgtttgtttttttccccaacattttatttgataataattaaagattcataggaagttgcaaaaattgtacagatatgtcctgtgtaccattcacccagtttcccccaatgattatgccttgcattactatagttattatagtcatgaatttgacattgatctcatgtgtttgtgtagctctatgtcattttgttacatgtgtagatttgtgtaatcaccacttcaatcaagattcagaacagccccaatcactacaatgatctcccttgtgctatgcttttatagtcacagccacactcctttgccaccatatctaatccctggtaaccacctaatatgttcttcatctctataaaatattgtctttttgagactgttatataaattaaaccatatagtgtgactttttgaaattggctctttttctacacagcataatgtctttgatccttgagatcctccaagctgttgtatgaatctgtaatccattcctttttattgctgagtagtattccatgatatggatgtaacagtttttaaactattcacctattgtgggacattttagtcttttcaatttttggctactacaaacaactgcatataagttttgctgcgatcataattctttttctctgggataaatgcttcagagtgaattatggggtcatatggtaaatgcatatttagtttttaaagaaaattaaagctattttccagagttttcaaactattttccagagttgctgtaccattttatggtacagccatatgttgttgttcccttaatgacatgtgagagatccagttctctccatctttgtaagcatttggtattgtcactgtattttattttagcagttcaaagaggtgtgtagtgatgtcttatcatagtcttaatttgcatttctctgatggataatgtactagttttctattgatgctgtaacaaataactgtaaacttagtggcttaaaacaacataaacttacgattttacagttctgtaggtcagaagtctaacacagttttcaccagactgaaatcaaagtgttggtattcctttctgcaggttgtaagggagaatttgtttcctcatcttgtctaactcctaggctctactcatattcctcggctcatggctccccttcctctgtcttcaaatccagcatttgtgggttcagtcctcatatcatatcattcttacctcttctgcctgggtcttccacttttcagaacccctgtgattaaagtagccccaaccaaataatctgaaataatggctgtattttaaggtcagctaattggcaatcttaattccatctgcaaccacagccccctttgccatgccagaataactggttctgaggattgggtgtagacatttttagggagccattgttctgcctatcataggtagatatgttgaacatcttttcatgtgcttatttgccatccatatgtcttcttcagtaaaatgtctatgtctttttgccattttcaaattggattgtttgttttattagtattgagttttgagggtttaaattttttttgttgtagatataagtcctctataatatttgttttacaaatattttctttcagtctatagcttgtcttttcaatcccttagcaggggccattcacaaaacaaaagtttttaattttgatgaagtccaattcattgatttttaaaagtaaattatgcttttgttgtcattctgtataagaactcatcaccaagcactaagtcctaacatttttctcctgtcttctagaagttttatagttttatatttaattctaccacccatttcgagtaatttttgtataaatagtgaggtgcaagttgagatttattttatctatttaatttgtctgtgaatgtctgtatgcattgctccagcaccacttgctgaaaagactatcctttctctacagaactgcttttccactgatgttaaaaataaattggctgtatttgtgtggggatgaattgtttcattccttaatgaaaagaggaaatacaataaactattaaagtctaataaggctaagggcatagtcatgtgttgttttttatatttttctgttatattgaaatattttaaaatcaataacgtaataaggaggcatttgcaccctcaaactctgaaaatattaagaaagtgggtaatgctatagtgagatgttgatcacagtggattggagactaatagctgtatgatattgataaggttactggcctctctgggcttcagttttattttttttttgtgaactgagagggctgaactaggagacccctggagtcttttgacatttgcatgctcacatagtatgtgatgcttctcattgttgagtttagagtaagagatgtggagcgggatctaggctgtcattctggtttacagcctaaagatgagacactgtttatatttccaggtagaggctgcctaattaactacaggttcatagtggttgggagcaagccctctttttcaaactacttcgggaggttttattatacctgtaataatcattatactatagaagatatcattgtagtttcttataaatacctcacacacttcttctggatttcataatggggtcactatatgatgcttcttgggatctgatttacaatttataaataagtctgaaatataaataagaaaatacaatgtataagagtcctagaggtttagtcagcagaattccaaataggagtttaaccctctaaggagcacttacagtcttcttagaaataaacacattgtaaaatgattatgagaaaatatttatcatacacattttaattgataatttagctgttatattttaattagaaaagagtttctgattttctttatggctatgactttaagcctgttatctagaacacagtttatattttctggtttcatcatgacagaaggcattttgagaagggctagagcaagaaattagcaacaggacgtcaatttcgtcttctttgtttacttcttctggctagtagcagaatttttttctatcagtaattttggcatcaataaaataataaaggattacaaacttcatccatcatatgccaacaaatttgataacttacatgaaatgtacaaatttctggaaagatagaaactaccaaaaatgacccaataagaagtagaaattccaaatagacctacaacaagtaaacagattgaattactaattttaaaatttcccacaaagaaagtcccaggcccaaatggctttactcgtgcattctaacaaaaatttaaataagaatgaccacaaatccttcacaagttccttccagaaagagagaaattggaattttcattcattgttggtggtaatataaaatagcgcagtctctttggaaagctatttggcagtttctgaaaacattaattctagagctgcatatgacccagcagtttttgtactccctagtatatatccaagagaaataccatatatctacaagaaaacttttacccaaatgatcatagtagcattatttataatagcagaaaatagaaacaacccaaatgcctatcaacaagtgaggtgacaatcaaaatgtgatatatccatacggtgaggtattattgagaaataaaaagaaataaagtattgatatatgctacaacatggatgaaccttgaaaatattatgcttagtaaaggaagcaagtcacaaaagactacttcttgtatgactcaatttatatgaagtgtccagaatagacaaatctatgaaagttgattagtgtcttccgacagctgggaggtttgggacaagagggagtgattgttaatggacctgttgttttaaatgttattgatttgattgtgttgatggttgcataactttgaatattgtagaaacgactgaattgtacacttcaaatggtatgtgaattatatctcaagaaaactgttttttaaaagtaatgtgaatatgtatgttgagatagcatggtatgtagaagttatgcaggggagtggttaagatcatcaacttgggtcagagtgcctaaggtcaacctcaccataacagttgtgggaacttacagctttcttaatttctctgtgtctcagtttcctcacctgtaagcataataatagtgcctttatcatggtgtcatctttaacattaaatgagctaatatttgaaaagcatttaaaacagtatgtggcacaacataagcactatataagtgtttgagaaataaataaatataggaagactacaatatttgtttcttggaaaattaccttttatttcaagagtttgatcttcctattctattatgttaaaatttccctttgtaaaaaaaaaaaggaaatgttagttacagtagatggcagttattttgtaatatctttaatttgctaaaggaacagttggcacttctatattgatctcaaagtaattttaaaaatattttttgaaattgtacttttccatgaaatcttaaattagagaaccacagttctataactatgtctttgttcagtggcctttggaaccagatggctcaaaaaattaataaccattcaagttttaacattagaagagtattacagatattcagctacctagaaaaatacttatcatataggagatgttaatgaatgtgcattggaatgaatgacaagaatggatcataagtgtgtgacttgctcagtgtgtgtgtgtgtgtgtgtatgtgtgtgtgtgtgtgacaacgacctctttctactggtatcctaaagtctgtatagttatatctgatatgcttgagtttgcatgtttctgctaaccttattcccatgagatttcactttgaggtatttatatggattctaatcttgcagctaagttttagaatccaatcctcaaagtattaagggataattgggattatttaatacccctccccaatttttctgtaatgttttctattagtagtatggctgctgctatgtttgcatgtgttcactatttttatttccaatttctattacatttttatttttcttcctagtttctgcagactatttaaataattttatttggtctgtctcaccctctgtgttggcacttttaatatctttaagagaaacttgaaaatattttagctccatagagcacgtttcagtttaccttttgtattccatagcctggatgtaaggcttctttatgttttgtgaacagttagaaccacactgactgctatgaaaatgcttagtaataattatgcttcctggatccttgtgaaataacctgctttactcaatttagtacacaagttattgagaaacatctatagcctttttcattgcagtgtgggacagtagttcagtgcataggatctgaggcgctgtcacatctttcttgatgtctcaaaaacataccattgattttgcttcccaagtctagatttaccaacatgtgagagactgatgctgcagtgccaggagaattattactgatcataatccaagaagaactgaccagagaattaaagcatttaaagttgcaagaagtaggtttattccttgactcaaaaaggcttagtataacctacttgcacccctgtaagcatctaaattattgtcttaagagaacagaaccataatgataaccacagtattgcttaatatctgctgctgttttaaagcatttcccacagtatttcattgtgtcttaatgttactaaactttatattgcaattgcttagaactgctttaattgaagcaatttaaatttacatatcctactgagccactttgtgtgtgaagcactaacatgtgatagtggttcttttttatagattacaaagttacaaacagttggttgtagatcttatctgtgaaaataaaaagccttgaacaaggctaatgagaatgattagagggaatttattaaaaaattgactaaggcggtccccctccctctatactatgtcagctcacagcgggatgtctccaacatttattgtctgtttaactcatttttggcatacaactattatgcaactgtttcaaatattaatagctcctctccacagctaaactgtgatcttgattttataccagccctaatagtgtcaaggacagaggtgacaacatcttaggagctcaagacgaagaatttgaggtcattgtcctgagaggtcatgtttagttacatagcagggaatggttatataggattacaactgtcttatttgaataatttactgcagccctttgaatgtgtatttttttcatagaattttcagttactttgtctctttgagatgttcccgtgtattgttcaaggcatggatttttattggacatactggttgcaagtgatgataatccaacttaaatggatcctatcattgaaaattctagggttagatctggatcccaggctagaaaaatatcattaagatcatttttttttccattgcacagctcagtttttctctttattggcttcattcaagtagactttactcctacaaccctgtcaccaacataaataatttgccacaaagtttatatcttattgtttcagcaacctcaatagaacaatagcttctctatttgttttaaataaaagtctcaggattgcatctcacaagactgatgcaggtcatatgaccccaattgaactaatcactatagctaggacagtgtcgtgcaccaagactgcctgagatgagagatgagaagtgtggattcaccaaggaagatcatgctgtcactatcagaaaatggaagaatgaatctgttctccccacccaacaaaaatacatagttttaatttctttctactttatgaagtattcccaattatatttctttttcttttatgcgtgaacacacattttctttcctctgtaacaaacttctacctttaacattccccaggtcatcactgcattctccatgtgaacagtaagaataatgagagatcagcgaagaaagcaaaccttaacccctgttcctgccagaactaagggtttcaactgacatcttctagagtttatgccaaagcctacctatttctgatggatgatgtttaaatttccattgcatcctaagctccacttcactttaggctgccaaatgattttagaaaactcctcaatgaagattgtgtaaacaaaatagtggttgagacctttacttatgtcatcatattcatttagtctagcacttttcctctatcattgactcaaagttctctttagccaaacatcattgtgtcaaagatcatggaatacttttgtaatattgaaagaaggcccagcttctcctttcctaaaagtgttatgtcaacctcagttaaaatcagtagtccacagttgtttttgccaaaacaagaatgaattacattggtggtgaaagtccctcttctagtggcagagagagaatctagaataattcacccactcgggatatgggtggtttgcaaggaatgaaaaatccaactagaataagtttccactttgcaaaggacatcacatttgcccacttttgtctaggtagcagtgttcaagaatggggacttgttttttcttcagaacctctagtctagtaattttattgaatgatttcttcaaaaactccactatttcaaaataattaaaaactcatttgaaaatcaataaagccctcaagatgtttttaaagagtttctagattcacattttagtttctcactttaaaatcattgttttttaaaattgaatttaagcctttcataatttattgctaattgaaaacaaaatcaacaataagcataaaatcccagttgtaatccagcacagcctcccagatgcttgttgccctattttgatgtgtcctttcttttgaagagcttgggtgttatgtggtcagcactatccaaacaattaatgtgattgagtgaaaatgccccttcagcagaaatagtttcttctgtgaggaggctaaactgccattagaatgaagaagagttatgtaagactattttttatccaaactgattgggctgaattccagatttctctaatgaaaccttgctgaataactgctatgcttgcagctgtggaagtattcaaaatcaagtgctgattcttgccaattgatctactacttctaaactgcagttctaaaagctaaacccaagtgattgttcaaagaaactgattgtacaggaatttacttttgatgatagtaagtgggccagaatctaggacatgaacatatcagttgttatgacaactgttgaaggagacctgtcttgatagcatggagttttccattggcatttggcaaataataccatccttcagaactcaggagaccatttacaaattaaggatgatgatacttatattttcctagcttctctgaaatattctgaaaactagttcaagatttaaatatttttcttttattctttagcgtaaaaaactttagcaatctttaagaacattgtgatcaagcatcttaggctaatctcaggataaaacattgtgactgacaaaaacaatgctttataagaaaaatagatatgttaaccttgtgagaggaatgacttgatcttgtggttgtcgttttaaaatgcaaataatacatcataagctgaaaacataatactggctaaagattgctcttaaaagaggaccaaagttctgaagtgaatatattgaagtgccaggatgtttattttttatgaatggtgagccacatatacttctactattaaattatagtcttacagtgtctcaaaattttcagctttccaatgcttggcttcttattacgtgcagaaagaagagaatattgatatttcaaaatctagatgtatcagcagacttatattgaaattgttttaaattgatccctaactattcttagttcccagccgttaccttatatattgctgcataacaaatgccctaaaatttaatggcttaaaaccatagccattctcactatttgtcatgattctttaatctgacatgggcccagctgggtagttttgtggctggcagtcactcacggctgtatttagcaggcaggtttgcagtgagctggagctaggctcagttgggatgctgggatgacttctcgctctctgtatagtttctgggcctctctcttttcacatagtcattccatgtggctttttgtttttttgttttttgttttttgttttttttggtagtttagcttcttacacagcagctcagggtacccaaaaatacaaaaataaaaatttccaggccttcttaatccttaaacccagaattggcacagcttgcttttgcagcattctatttattggttaaaggaagtcacagtgccaacccagattcaaggagagaggaggatacaaggatgtgaatgctgggaagcacagctcattggggggcacccaagtaatcatctcctgcatgatcatttattgattcattcaaatggcatgtgatatttctctgttcattatgagaaatactagttacccatatactctgttgtgtcgtggatagatggatttagttagacctagttcctattagtagggctttgcatagcctttgctaatctctgaaaaatatcttctgtatatcaagcagacatgaccttgatttgcagaggtgacagtttatgaggagaggcagatataatcaaataactaaataaatatatgtgttcatgtgtgtgtttatagttataaactatattataaatggtagagggaaagtatagggtgccacgagagtacatgaatattaggaaagggaagtcaggataatattccctgagaaagagatgtgtgtttgaattatttaaagggcaaggagagtagagtagaagagtaaagtgatgggcaatgggagagatgcattccagcaggcgaccttgaggtgcgagagagcatgacattgaggggagaagggtgtttgaggaaatgaatgtagacaatgtgattatagtgcaggaagttagggaaaaagtgatgtgacgtgcgactgcaatgaaaaaatgggagccagagcacatagggacttactggctatgataagaatttgtaagaacaatagaatagcactgaaatatttaagagatcagctgaagatcatggcaaataacaagactgacaatttgtaaaaataaatctatcctttgtgtggagaaccaatttaagaggccaagagtgaatgtgcaaagactaattaggaggtttttacaaaagtaaaacccttccttccttctttccttcgttccttcctccctccctccctccctccttccctttcctccctccctccctctctcccccttcctcctttcctctcctcctcccttccctcccttctacccttcctctcctcctcccttccctcccttctacccttatttccctctttcctatcacacaatcatttgttcaatatatacttctggaatgctgctgtagccagggactcatccgggtgctaaggatctatcaatgaacaaaacaaagtccctgacctcatggaacttacattctgggaatcgtatgaaatatttctcactatcctttttacatacagtcagttctctaatctttatattttatgcacaactgaaagggaaagggtactaataattaccaaatgccaatcatatattaggcatatccacctatgttatgttatttaataactaatggcttactgtgattctgactgtcccatttaaattctgattgtagaaacatattttgtttttgtgactgattggggaaactttaaatattcaagaagttaggtataattatgtgtttatgcactatgtgcatatgtgtgtatgtgtatctatctatatatctatctgtttgtatatttttccctctgtcaaaaaataggtggtttgttcaaagactgattggaaattattttaatatagactgaagatgacagactcatcttcaaggttagaatttgggatggcgaggttagaattaatcaagattatgggttgggatggtgaagttagtttaataccatttaaaatattaatatccaggtggtgtgtgtgtgtgtgtgtgtgtgatgtgtagaaattaacaaagacacctgagtaaagaaggatggcttgggactggaagtgtcagatggcattgatgacaaagagtttggggaaaaatgagaacagaagaagaaaccagtaccactcttgaaaccacattccagtttagggtagccttaactcttgtttcttctgattccagcctgctttcttttagcttttgcctacagttgaccttccttgcagcattaaaagaaagaggttgttaaaaatgcacttaaaaaataacgctgtttttcaaataaaaaattaaatgtctgcatttcaaggcatcttttctacatttataaaactatctggagtcaaggcacatgcattaaggcttacattatttttgtgaaggttcattccaactgggttttttctttggttctctggggcaccctgtttgatttatttgagcagctgtgatttaggattgattgtcactgtaatattatagttctaatctcttgaagtctagtactttgtttttatagttcacaactgggaattaggaagttaacctcagctgtcaccatatgtgacatggatataaagaaagatttcttagcacagtcactttaaagaacccttttcatgtcaataagaagcacttaatggtcaatttacaggttgttactttcctttcaagaaatatccaaatactttgatttattaaaatatttttgaggtttatattcaaataacaaagttgacaggatttagactattgtacctttatatatccattatattctctaggtttgctattatgctttttgttctagctatatttaacctgcatatccatatacttattgatttaatattttgttacagtttcaaaacaaaaattaatgtgtcagtagcccagtcgttaggagcatgaactctaaaatgagattaccaaggtataaattctgattctgtcactatgtgaccttctccaagttgcttaatcattctgtgcctcagtttttctatctgtaaaatataaatagtaatatgatctatctcataagatttttattctatttaaatgaggtaatatatgtactgtacagcacttagtagagtgttaggtacccattaaacaaaaggtagcttttagttaccattattataaagtggaaccccagagagttcccatgttagaattcagcaaagtgaggagttgggttctcagctttgcaggttgagcaattcagttttatcagtgatcccagatttaatcatctcacagtctctcagatgattgaacaaatgaacctaatagtgactaatgtaagagacagaagctccatttataaaagtgacaggaaaatattttgaaacaattactgaggtgatttttttttttcatgcaatcccttttacctgtagttctgtttgcctcttcaatctagatctcagtctctgtgcctcagagaagggagattttattagactaaaatctaatggaggaaaaaaacgtttattaatggtctttgagtttgaaattctaaagccctggtataaatacgaggcaagtaagaaaattcattcagtcaagccctgtttgctctgcctgttgactaatgatgaagatcctcttgacatgggtagaacaaaggaactagggaagatgaaaatgaagtaaatgcagatgttggtccctgaaaagttctctgccctgcaccccactgcaaaaccgagatccctgaggaggcagcgataatagtctgaaatgaatttgaggctccaagagcagaaggacctgtcccttgcttcccaggtggtacctgggaaaatacccagatgctggaattttgtcatatcctgggatagtatgacaccagttgaataggggtgatgctataatacagcatgatgtggtatcttgggccaagaaagcctaagttaacttcactgagtttcttatgatccctagagtggcttgctctttccctctccccgcctcccccagattaaaaatggccacgaattctttctacctcccatgaagggacagagtctaattcctctccccttgaatgtgggctagcctggtggcttaattgatgaatagaatgcagcataaatgagcatctgtgacttccaaggctagataacaagaagttttgcagctttcacttagatttcttagaatgctccccacaaagaaagccagctgtcacataacaagtctgaccatgctgctggagagcctacctggggaggtgctgagactgcctgtaggggagagggaggagctcagttaagtcctgtcttccatccatctcaccaagatgactggcatgtgaatgaagccatcttggatttccaaaccagttcagccacagtgaaacaccaccaagtgacccaagggaagcagaatcacacaacccagttcttaaaaatatgacccgtggggcatgaacattataaaaataattattgttgtggccattaagttttggatggtttacttccccacaatagataaccaggtcatagctcttcatgtgctcttagaagagggctgcaatagacagagttgtctaacttcaacctcaagaagtcttttggtcagagaagaactcacaaactgactcccaagggaacacttgggaacaatgctatagattatattttgtaattatgcaatatctaccttaaaaggacctcaggggagcctctttttttaagtttgaacaggaaaactcattcatttgcacatcagcagtgggcattagcatggacaaatgttgacagagaagcaaacaatactgccatgattggtatcattggagttgtacaacactgcagccttgctagccacccacttactctctaagtcttagacactacccaggaaaaaggggggatggtgaggaaccttcatttcactgggaatatcctcatatggcagaagaaactgtgatttgtctgaagactatcatcttgaactaagttggttatttgccagtaggaaaaaatggagtttgagaattaagaatagtaatagaaaaatgaaacagttattttttagcacaattgagtttgcagcttgtgagatcaatatctaccatagtaattaaatatgtgaagtacagccggtaagccaattagaaaatccccattatctgattagctcatctcttcctgtgtccatttattcttttacagtgggaatggtttttcggttgtgatcagaaccattgtgtctgctccagtatgtactcatgctaggaggataaattagtcatcaggccattcagtcatcagaagttctgaacaaaggtaataggagaagctctgtcttgtgggtcatcatgagcctgatgaaccacttctgccttacaatagagaacagctctttggtgcttagaattcttgtggtgtcccatgccctcattcagtattgttctcttccatacgtgctaaataaattatagcagattctggcttcctggttaccattgatttccttctaatgtgaccattccacaagtaatgacaaacttaatcgataggtatgtttatactgttaattaggtatactcaaagcttgtttgggactttgtaatatggcgtctttcaaggatctcctcagagatcagatttcatttgttatatgttgattttcctaatttaactcagagtcctgagtatctcactgttgcctccatgtactaagggtcactctattcccaccctgtcctgcaagacattcagtgcagtgccaaccacacttaacaagaaggatcccagtaaataagaaagaggaagcatttacatatttttgcttaggaaatgaaaagaaggaaaacttttaacatctcattataaatatctaccacccagtaattgagttatagcttatattgtgcaatttacaattcatatctttaaaagagctcacagttacctctatttgtaagttttgacagcaaaaacctgttcatttcttcatcaaacattcattaatccctaattagtaccaagttccatggttaatgcttattaacagtcctgtgaaaggaatattaaaaatatataaaccacaaggcccataataaacatatgaaatgtttacttttattagtcatcagagagatataaatttaaacctcattgagataccactatacatttatgagaatggctaaaatgaaaaagactaactatgccatgtattagcaaagatagatatggagcaattataactctggtaatggaaatggcatacccaactcggaaaacgttcagtatcccttaaagagttgaatgtacatctaccctatgatctataaattctattcctaaattgtattagtcatctggataacaaattagcacaatgttaatggcttataacaagaataaacacgtatcatttcaatttctggggaatcagtaattcagatgagggtttaggtggtttggactcagagtctttcatgagatttcaggtaatatgttggccaggtctccagtcccctgaaagcttgactggggctggaggctctgcttccaatacaggttactcatatgactaacaaattgaggatgacagttggccagagacctcagttccttgccatgtggatcccatatagtgctgcgtgagtgtcctcctggaagctgacgtgccctggagtgaatgattcaatagagagcaaggtggaagcttttatgacctcacttcaaaagtcatactccatagttttgtgaaatatcctattaatttcataaattagtcctattgagtgtatgatgtatgtatgtgcggggagaagggtgtggctatgcaagagcattgagataaggaagcaaggactattgcatgctgtttttggagtctggctaccacacaggtatttatcccagggaaatggaatgaaagtccctcaaaaccttgtacaagaatgttcatagcagctttatttataatagccaaactaggtaacagcccggatgttcacaggagtctggataaacaaactgtagtatattcacacattggaaatgcctcagtgataaaagagaactactaatgaatgcaataaagttaataaatttcagaaatattattctgagtgaaagaagaaaaagataatatataccatattattcgacttgtatgcaatcctagaacaggcagaactgtaggtgatagaaatcctatgtgtcattgcttctcacagggatagtaggcagatttactgggagtgggtaaaaggaaacttttggggtaatggaaatattccatcaaatttatcaaaatcaactcaacagtacacttatgttctgaagattatatgtaaattataccctgataaaaaatacaaggcataatccaaggaacatgaaagacaaataagccatataattgataagagagaaattaatacagaagggaaaatattaaaaggagaaactaaggtacatatatttttcaaataagtaaacacatggtaattgtagataattttaataatatcttatttttatatttataatctccacttctggaataattgttgatttattttattttgatgtacttcccagtcttttttcatgcatttaaaaaataaataagaacgtttggtatttgagattttgtaaattgattgtgtttgtgtgtgtaaatgtgtgtgtgtatgtgtggttggccttacagtataaacagtcctccaaattattaaagactatttttaagcatcactttcaattgttatattccattgtaagactatttataatttatgtaaccgttctgttactgatagacctttaggttgtttctcattatttaaataatgcagtggagttgttcataaagggtgatctttagtgttgaggattatttccttgggctagggtttccaaaacgttctagatcaaagaatatgtttcacattttcatattgctttctacagggtttaaattattatacacatttaccagtagtctattaaaggacttattttaataggtaagtgaagtaggtatttcactatgctttgataagcatagtgaacactttgttcatgtgtttattaaccattgtaattgagaaaaatggctgaattgagccttaaagaatgaatagcattttaaatatcaattgaaggcaaagatggggaaggttttttctgcaatgttcatggcatggcaaacaaagtcattccatgtcaacctcatggaattgtaagtcatttagtataaaagcttagagcagttgttctcagtcttggctgcacaataggatcacctgagggagaatgtaaaaatctccaatatctaggccttactagaccaataaaatcaggatagttgggtgaagaactcaggcatcagtagtttctaaaagtccccaggtgattacaatctgtaagcaaaatgtgaaaccagtggtatagagtgaggtgaaatgggataggttgccattagagatgaaacagaagagatgaagaccatatgtagcaagacacaatgctctaggataaattgtatacttcctgggcaaattagcaaatgctgttaggttagtgtccctttcttatcatcttggagtcctttacctttttcatgcactcatgcagtgtgcattactcccaaccaacaactagcacctgatcttgtggacaggctgcaagcaaaccgcccccactgccacccacaagcctggagacctgggagttttttctccacacccccaggacataggcctgaagcaatgattgctgatgatatgatataagtaatccagcttcctctttcctaatcaagataattctgacatgtgaactatactagtccattcaagtagccaatatgcaaactttgccttgttatctaggacaagatgagcttgtgccagaacataaatctgtatgctgcttccttcacaaagaaatgtttctatgaaagaaaggtcagctgaagtaaatagtggacttactgacttagctgcaagcatcttatttcatcatggaccagtgacacagaccaaggatctgcaaaccacactttgcgtgctctgcagcagtgaactcatttttaaaatatccttttcttgccatatctaaggtcccggccttagtttagatgcccattagttttgaggtttagaaccactggtttgcatttcaaaacgtaactcaagaaccatgccaatatttcaatggagatggtagcttcctcagaatttgtaaactgaaattctctttgtgagatatgtgttatttactgtagacttcatagctcatagactgattctaaattatatttgtaaggtaacttaggtgtatcccacytatctgacgtggagcaagtattgaaaactttctggtgctcagttttctcacttcttgaatgaggaaaatgaactacattattcctaaggtctctttcagttctaaaatgttatgttcaacaagagctactagattatgtcagtgaaacaaacataaaacagattattccagtagcaattgtcacttctcaaaacaaattgacaaaagtcatacatctattgtaacaacaattctccaggaagctaacctttgcctgtttttcataaggatatgtttactgcttttaactttgctttggaaatgggtaaccatctaattaggttgataaggtcaacatgcaggagctttggaaagagattggataatatttgtgagtgtgtatatttgcctagacatgctttttgtcaagtttattgtactttaatgattagctagaaataataaggctgctgtatatgctattttattaatgctgtgtcatgtatgggtttttcgaaggtaatttgaaaatacagagaaaatataattatttgagggtgcttttagaagaggtggatatgtttataaaattaaatagtaatttaataacacaatacttctcaagacagaattcaccagtatacatggttcatagagagggtttgtggcactgaatgagttttattttccctgattttcaaggagcatgtaaatgcattttggtgtgatcttgtggatcaagaaagatgattttaacatatgtaaatcatttctgctcatcagtttgtcacatcttgtccccaaacaaccctaaaatagttcaatattttttagactcttttgttgctcaacttatctaggaagaaatgtggacttcacagtcatatcacagactttccatttgaaatgattctcaattccattctcttctgggctcttacacttttgaatcctcataaaaacatggggaattaggacatctgtgtggcatttttaaaatttattcttttttttccttaagtgaggtataatacacagataggaaagtatattgatcttaagtatacaacccaatgaatttttacatatgtgtacactagtataactaccacttgaaccaagatataaagcaagatttaaaaaatctcttctcatcccttcccagttaattttcctccatttagaagttaccaccattttgacttcaagcaccataacttgattttgcctgttcttgttcttcatagaaatggaatgataccttatatttgctttcttttgctcaatattgtgtttgtgagattcatgtgtattcttgcctatggtataataaataatcattagcttcatttttactgtgatgtaatactctatggagatttcattttactcttgatagatctttattttcatttttcagttatgaatgtctgttgtgatttttgatgaatacatctactcattcattttttagttgacatagctagagttaacatggctggtttgtagggtagacataattcagctttagtaaatgctgccaaaggattttacaaagtgatagtactaacttctatttctaccagtgatgtatgagagccctagttcctctgcatttgtgcccatatgtgatattgtcagtgtttttcattttaatgattctggtggatgtgtggtagtatctcactgtggttttaaattttatttctctaattaataataatatcctatgccttttcatatgcttactggccttctgggaacctgttatatgaaatactattcaaattttttagctattttcctttaattgtctttttttgtttttgatttgttctttatgtattctgataaatatgtaaaaaaatcaaattaacaagtatctgattccagtctgtgtcctgctagttttttattaataatttattttgatgaacataagttattaattttaaggaagtctaatttatcactattttctgtgattgttcatgctttttgcgttgtgttttactatgtgatttgaaaatccagtcaccacaaaatgcattcaaattgacagatgctaggtttgtttctttccccattaaaaaaattgtaatattcacatacataaaatttaccatcttggccatttttaagtataaagtttagtgttaataaaaacattcataatgttgtaaaaccataatcattacccatctccagaactctttttattttataaaaccaaaactctgtattcattaaacaacaactccccattcctccttgtccccattgtctggcaaccccctgccaattttctgtccctatgattttgactactctaagtatgtaatataagaggaattatacaatatttgtcttctgtgcacttggtataatgtcctcaagatttatccatgctgtagaatatgttagaatttccttcctttttaaggctgaataatattccattgtatgtatataacatactgtgacttaaattctggcttaccatgtttgtctatcctgaaaaatgtcccatgtgcattgagaagaatgtatatgatgttattgttgggtagtgttccatacctgtctattagatcaaattggttattgtgttgtctttcattttcttacttgattttctgtctgattgttctatccattaatgaaagcagagtattaaagtatccaactattattatagaactgtctatttttcttctcagttctgtcagtttttgcttcatatttttattgtcctattggtggcataaatgtttaaaatggttatatttcttgatgtactgaaactgttactaatatgtaatatgtctttctttgtctcttgcagtttttttgatttaaagtttattttgtcttatattagcataaccactcctgctctcttttggttaactctttacatggaatatttgtttcatcgttttatttttaatctatctgtgtctttggatctaaagtgagtttcttgtagatagcgtattgttggattctgttttttaatctatgctgccaatttgtcatttgattggaaaatttaatccatttacatttaaagtatgtaatcacaggttgaaataaagaaggaagcaatttcctcaaagaagtaggtatgccactaccaagagaagggaaataaggtgctgggcagacacaaataatagatgtctattacaaaggaaataaaaatgcttgactcatgtgagctggttgttgaaagtctctggctctcagaactggggctctatagaggatcactgcaggcctaagcaaaatagaaatacaagatgcaattccagactcttacttggaagtcactttcatggggttttaaggccaaaggtggatccctatattacatccatcagaataaagcgctatctgattttctcttactggttccaaggagatgctcctgttggtaaaataggggccccagaatctcccaaattatcacccttaaaagatcttgtgttagtaattcatgtttaattccctttccttcctaagtttctccaacatgagtataaaattcttatggctacaacagcatttagataattgataactgtgacagataaacaacatagttgcttttgaataattgctacttctagtattaactctgtagcaataagcacttcttagggaactctattcaattcttatttctatcttatttatattgggatatgtgattctcaaactttaacatgtgtacaaatcatctggacggctggttaagatatagattgctgggccaaatctctcagagtttatgataacataggtctgggatagggccccaacatttaacaagctcctagtgatgctgctgttgcttgtccagggatcacactttaagaagtagataaaagatacgtccctaaacatattaacatgaataagtcctttatacatcatattttgtctcattagggaaactttcaattaaaagaaactgtattttctttggaaaataaagagcctttattataaaaatgaaaatatttgctcctcaattaattttgcaattttgatttgcttgagggttggggtaagagatagattcatatatcagattaatttcttggaggccatgcatcttgcagaagggaaaaaaatcctcataagtagcattttttaaaacacaaggatagttttttatcccattgcaagtagccttaacctctgctctacagtttttttatctgttcagcctaatcagattttgtggttggttgatttttcttttatttacgtgttcttgttgtgtatataccagataccaaatgtctttaagtagtatttccaattgggattaaaaaggtctgattctaaattctgtcagttccagatttggtcgccaaatgaatcatagaaatcgctacagaggagtgaatcatactgctctctttctatcagtcatggccaataatttcagttagcctacctcataaattaaaatctgggagcaagaatttttttggtagcaacgttgcatcagtactgacatacaagagatgattctgagagtagcatgggagagaggaagaatacagattctgcaataataactgtatcaggtgatatttttcttcacctgttacatttcagatgatggaactttaagtattgagtggctcaaggacttctggggcacagagattccactttagaagctttctttcttccttgaacactttaggtttaaatgtctccttttaggacaaactcctgtttggagtatggtattttctctattctaagtaagtattaagaatcaataagggcctctgtcctctgttcagtttctgaaggaccatgcaccatggttaaaatacttgtccataatatgtcatgatagtgtggtatgcctgctaacatcactatttcatactttgcagtttctaattctgccctaacaagtaatctttaattcttcttcaagtattaagataaataatattattaaattggtatctagtagttatactaaattcatttttattaagttcattaacagtgcctgtgttcaccaccttactcgtaggtaacaaacatggggcatcttcatttaaatcaagtttaaaaaatattctataagttatgtaaacacacaaactagaaagtattgaagataacacaagagaaagattgtcaaagtatcctgtctcctttctatgaatttgctggagaaaatagaaaagtggactaggtcatgagcagaattgagtttgtgtgtatttcaggacaccgttgacgtttccttggctttaaatgatttagaatggtgcctggtggtagaaaactttctggaggctacatgagaagtgatactaataaagttttcatatgtatgtactctcttctcaaagagaaaacattttatttgtgatcttagcatctctctcaaggagatgatatggaagttgagcgtctgcaatggttcgtaaattgagggaaggtttaattcccaccttgttcatttaagtatcatgtactatgataggctcaggggaaaccaagaaaaattcacttcccatgacctcaattaatttcaattatagtgaaagaaacattaaaacaaaattataatacattaagatgattattctaaaagcattcagcataaagtcctatggtgcctacagacacctaatctcgctggacgagtctgagaaggctgcatagatttacagggcaattgagggccagagggaggtctaggaaaatggaggacaggtgccaatgacagaggcataaaggaagactggcttgtcattgtgtaaaggtgtagcagaaacgcagcagccaaggctactcttggaagcagtggctccataatgcctggccttattgactataaaaaaagtttaaaaaaaatttattctgttgtcaacgggggaagagaattttgaagaaatggaatggcaaactttcctagcttttacagagaattgcgaaaagaatcgggaggggagaagaggtaggcttccagaaatgactcccagaacaagaccatccgactggtctcaagagaatcatcccagaaggctgcccgtgaacctttggagttcaagaacgtatagtatgatggaaatcctgggaacaggaggctgccaccaacatggctgctacaattcttcagacaccatggtgtcagtgactccacacagggccattgctgccccaaacctaatatttccacacccctatttgccagcaacaataaccaaagcaataggaaaatagcccctgcttcgcttctgtctgccagctgtctcactagagcacatgaaactggtggaatctaatatgtatttgaaactcttatcgcaaagtagtctgataattgtagtttttgcctttccagactccacaatacaggtgagctctctggaagaagggagaaattaatgttgaggaccaattcatcatatatactagacaaaagatggatgacatggataaggaaatctatagagaagagaagcacctgagaacatgaacattcaagggacaattgaggagactaaggatgaatggtcacggggtcaagggaagaacgcaggaaaatgtagcattatggcaaccaaagaagaacaaaagtttaggaagaaggaagtggataataatgggaaaatgctgtagtgcagcagttatcaatttttgtagtatgacatcttttcagtaacaaaaattctgtgtacccctagtattaggcaagactttgttacagaaaatcaacttaaagtcatttatgcaaaaaatgaatttattgacacatacaactttaagtgcagtggggacagatctagcattagctgcttaagtggtgcaatcgggttaaacctttctctctccctcttttgctttgcttgtctgccctctgtattggcgtcattgttaggcaggctttttccatgaaactaggaaaaactgaactctggaaaccagacctacatattgcttacaacttctgatcccaaaagaagagaactttctctcttctagtatccccaggtcaaatcttagggaagagattgattggcctggcttaggtcaggtgcctttcactgcaccaatcacttgcaggctgtaagcatagagtgctccaattggctaaatctgggttacatgcccatcctgctggtggagggaatcttgtcagtcacacccaaaacatggaaaggatttttccatgagaatcacagaaagttatgatttttctattataaaaagagaaaatagaaaatggatgctaagcaggcaaatttaccagtctgtgacagttccacataagaataattacatatttagaatgtgttacttgagaaaaaaaatatatatataatgacaaagagctactatgaatttagtgacacttaaaataaatttctaaaattcatgataacagctgctatgtacatttaaaaattacatatatatgcaacgatatcttccttttgcaagtaatgcttggggagcttctagatttatgagcctctttcagtcactctgaagcctccaaaacacagatttcttgccttgaaattaagttaatcatggattcaaaaagtagcctatgcacaatttcaggtgttcttacataaagacatgctcaggaaatattttaagacattttcattcagtatatagagtaccagtaaatactgtaccttcaggtgggtgatttgctaccacccaaatagctaatttaaaaaccaaaataaaccacgaaaatgagggtaggggtagggaagcacacacagtttcacaagtaacatcttcttttaatttttttctagttctctcttttctgtttttcatttttaatatgcatatgatgcatagacaacaaatatggaaacattaaatgagaaaaaatatataaaaatgttattcatataatataaataaaaatatacaaataaaacgcgtaataaacacaatatataaaacatatatacaaataaacatttgtatatatacattatacatatatatctatatatatatttgtatatacatatatatattccctaccccacccccccaagattcttaaagcaagtagctttctcttgaggacagcttagagacctgtgccatatgaaatgggatctggacccgtccccagtgccctgtgaagggttgctctgtacattagctccccaatctgcaaaatggatgttgcttgacccgttttctttccgcctcctgggaactggttaaagtccacacaaactccttcaacctccagggacagaaatggcatctacgagctaatgtgagggtccctgggtgcagagaaatgtattaggagctgtgtttccggaatgacggtttcgttcttggtctactgagcgtcaccgagctcggaggacacctctgtcatttcagcagagtgacagggctcaatgattccagcgcccaggtggagagaaagcggctgaggggcttggccggctcctgtcgcgcccctcagtccgccccagtcccatgcaggctcagcgccaggctctccgcccccgccagctgtggctgtgccgcttctcagcttgggccatttgcagtggcctggcctgccataaaagagcatccaccattaggatggaaacgcagctgttagaaatagaagcaccaaagtgaaactgttcttggtccctgaggccacctggtcatcttcccctacattgtagcctaccagaactacctgggctgtaatctaatatttctgaaaaaaaaaaaaaaattaggaaaccctataaaaataataccgtgccatgagtatttacataaacagtgaggtttgaaataggttttaaaacagttaattaacatggtttcttagacatcaaagagcttccaggttaaaaaaattggggaggggggtgtatccttttttacttcagagatatttttgtttcctttttgggaaagcctttactatcttttgctaaataagcaaggagttggtctggaataatttaattcgcttcctggtggaatgcagctttattttccttgttttaaggattgaatgcatctatgtattgattactttgctgtttcaaaagttaaatttgattttataatttaatgaggctgctttctttattttagcatgtggttttaaaagttgtttttttaaaaaaaaaacaaatgagacatctcttttttgaggtaaatcaaaaaatcaaaagcttgaggatttatatataattttttcaattctcagtttatctttgccaacattaatggattttttaaaaacctggacaattactaaaaattgtcacaaatagcagttttactaaagctttgcttttattttgagttaatatattagatttagtacatttgttaagtagttaaggaaactggcagtattatttttttcccaatttagaatctacattgacatttgtagattctaagttagtatggatctcaaaatttgtgctttcaattcacattgagggaaataagactgagctgctgtgtattttcctttcttttcaatgtattttgccttatagctgcataaatagaaaagtaattacttaaaaataagtaatttacttacttagcaaggtttctgatggtagcttttattaaattctcaactaagataattattgcagagaatttcccaacttaaagcaaacacttcattaggttcaagataattaaaaaacacaaccattttatacttgccttcatgatctttctgtctccctccttccctctccctccttttctccccctccctctttctccctcttttcctctcctcccactctcctccctccggctctctttctcatctctctgccagcgtaagtgtaataacttcttaaccttatctcagaagatgaatactatgcccaaactaggaaaaaaatcccacactagaatgatgttgcaaaaattgccataagataatgatgacattttaccatcctgtgacattatcattattgattcttcctctattttatttaatgccatacaacaataggccctttgctggattgaagtgttgctaaaattctagtgtgtttgttttttagatgaatggcagaattgccaacaggaagcttttccaaaatctccattgttatccagagagaaaagaatgacatagcaatgtttttaacatttcaacagcataattttctttgtctctggaaaacgggaagctacgtatcattaggaatttcctgattaatttcctaaagtataagggttctagtgctatacagggagcaacccaggcgacctgctcattaacactaaaaaaaaaaaaaaaaaaaaaagaaaaaaagaaaaaatactttccttggggacaagcaggatttctaagggcttgctggcaatgttatttgactgtacatagaggtttccagcacagatttctcttccagctcagtgaaaataagagtccaggcagcctggctttaaatcagttgatagaaaggcaaagatctcagaaatctggttttaatttatcagctttgagttgctttttccttcaccttttcatgcttgtcactggctgcctaacccaagtgaggcaggtttcctgtagatcccatctgtcttgccggcacctcctgcacttgctggcatcccttgcccttgttggcaacttctgcatgctggatagtgtcccgtcaggtctaggataacggttctcaaagggcagcctggtgccattgctagtccacagatagactgcactttgatgcattaatgatgtttaataccacagtgactatatttttactttgttatactgatcattgttgctgcttataagaatacaatgggagacaggattctgaggctgggtgctgggggaagccatttaaaatctggcagcactggcgggaaagcatacctggtgctgccaggttggagcttggtgcccttttctgcctttttcatgacacctctaagggggagccattgtcctgctattctctttggctttctttttaaggggctgtgcacccatagatttgctgtagccaaaacttacaagaccgtaactacacagttcaaccctacatacaccctgtgatatctctgaactcttctctactcctctcttccctgctcacttggccccagctgtgcttcagacacaccaaggtacttccagacacttacaggcttcactcctgcccctccattaagctgttactcaaatgtcgtcttttcaaagaatctctttctgggcatgctatctaaaattgcaatccctactgctaatacactctatttttgtctttgcacatatcaccatctcacagaatgtattttactcactaatcacttacacattttacttatatttacttattaacttagtatctgtcctccctctgtagaatataaggtaaatgaatatagaggtttttctttttgttcactgctgtattttgcatgcatggaacaatgcctgtcacttaataggtgcttaataagtatctgaaagaacaaatgaacagttagaagcccgatacatttatttcttaatctggtttatacccacagcagcagaaatgctataatgacttgccccatttaagtttgggtcaaaattcagtatactgacttattaatgaagtcatttggaatgagtaagagtcctaggtctatgtcgatcacactgaaataagagcagaccattgattgattcaatactaaatgtgattgttctataactttctgaacacttcatgtaacagctctgtctaaatctcagaatctcatttatacctcatcactgaatatttttagaatattgaaggagtttattggggagagaatgtttactatatctcaatcacttcttatatatgatctattttaattcttataaaaacagtgtaaaaatacattattcctatttgaactgaaattctgaacatctttttaattactcaaggtttcacaaattatgagagaaggttatgatcttttcaagttatgctgtaaaataaggacttctgttagaaaacaacaaataaatgattagactaccctccatgttattcatcctctgttagctgaatattcgtcttaaagtagggccctgccatgccattctcctgctaagagtctgcattggtttcctactggatcaaatccaagctaaggcactcaagtgccaagcaaggcactcaaagcctcatatagtctcatttccccttaaccatcttaggttatttacctcagctgcctgtaacaaatcctctgctctagtcaagaagtttctcttcttcttttcttccttcctccttattagccacccctcctgcgttaggcacccgtttactagtctgccctgcttcagggacttcttatttcttctctgatgttcctttcaggcatgaatgtcattctttttttcctgcttatccatacaccttatggacctatctgtaagatccacctgtaaattacacactttgttttcatgtccctagcctacaacaaataatctctctcatttttcttttcttaattacttttgaacttatcaggtgtaccacacaatttattaatccttatttaattacagactgtagcattctataattgtttctagtgttagccttgctctctaaacaagattgtaagtgcttaaagagatttatgtcttatactttcccgcctatactttgtagagtagaggttgttttattaagagatgccctacaaatacttggcttttcatcctgtataggtatgagtcctgctattaatagaaacaatgacatcattttaggatagatagtaaaatgtggtttatccagcagcagatccttccaatctgatattagttttatgcattttatgagcacacatattttcagaaagtcactggaagattttgcttctgttatatttgaaatttgaacaccaaacttccacattgtgaaatgtttgcatgaacacttttgagaactttagatgaaaggtgtagtataagtacaaagtatgcatcttcaaaaagcaaaatgaaaatgcaaatatttagaaatttcaaaacaaagcatgggaaattttgggtatattgcaaggccaaataattcatcattccatttctagagcactagaaaaggttgggaaatctgtcctttgaagccttagagtatgtatatttttctctttagccctgtgctgtttccttgaggatatgcctgtagcaataaaggtaatcgggaaggctttgaatttctgagacagtgttaagcattttttaacatcagattaaaggtggcaaaagctagggatgatctacaggtgacttcaaatcaggggttacattgcaagtccgtcttttggatgagataagtcaaagtgccagtgaatgtgttttggtggcaagaaaagaagctgagagggtcaggatgcagaagtcagcattttttcaagaaacactgggatagaatttctttgtgtggaactgtaccatgtctggagatacctcacttaatgacattagttgaatactgtgcagtttgtccaattttcaaaatgaagtacatttatgatttttccctgtcatgcatatttattgccttttctttttttgttttattccttgagatagggtctcaatttgctgcccaggttggagtgcagtggggtgatctccgctcactgcaacccccgcctcccaggtttgaacaactctcctgtctcagcctcccgagtactacaggcacacatcaccacgcctggctaatttttttttttttgtacttttagtagagacggggtttcaccatattggtcaggttggtctcaaactcatgacctcaggtgatccacccgccttggcctcccaaagtgctgagattacaggcgtgagccaccatgccccaccctattgccttttcaggaaagtttttggagtgttctgaaggttggggaggatccacattctctatctttagaagctttctctttagtgtccctttgaatgctggcttcagttcagtggataataggtggatcaggctgggtgcatttttagattttgtggtatcagaatttgaaaacaagatctgctccaagggtaggggcaggtcccactggtagagacaaaaggatgttttgccagtttgcaagcagagtgcaatgtactgaaagaggagtgctaagtgcaaagttgcacatctaagccagctgtcactgggcaaagtcctgcaaagtctcacaggtggcaccccatgggccggcccatcacaggaagacagagcctgagtgtggccagtttgtggtgctccaggcagtgggtcatgaagctgggctcaagtaggcctggcagctgacagcggacctagcctttgagctggggatcagagttgcaggcttaaaggagctctcaggcagaaacctggaagacaaggaaggtgggggagtatgataaggaccagctgctgaaaacggggcacacgtggctacaaaaataataataatccccacagataataataataaagatagctaacacttattgatgcttactatatgtcagaaaatgtcccaggtccttcacacattttaactctatcaatccttaaaggctggtactgctatcatccccaccttatgggggagtaaactgagtcccagtaaggtggaatagcattgcagagctacacatctaattagtggtagaatagacatcttaatccaagcattctgggttaaaaagtctgtgtgtttatcctccaggctatcccaccttcaagtactaaaaggtgatacaaaataaattgagtctttacagtttattggaaagggcaaaagctttgagctagagagataaggatttggatctcacctctaccacttgttatttctgacattttgggaaaatcatgtgattatcttagatttgctatatcatatgtagaatgcgggaaatgccatccagcccattgattttgaagaactaagtgaaataatagatacaagctaattagacttcatctggcaagaagctgccactcaacaaatatctgcttgctttcattctctaaatgcccattcgtatagagctctttcagttacttccgattggaaataggattattccagggcacaagtctgggctaagcttgagataattagggaagccacaggtttcaacccttgtgaaaagaagaatagatagatagatagatagatgacagatagagacagatagatagatagatgacagagagatagagagatatagattagatagatgacagagagatagagagatagctagctagctagatagatagatagacagacagacagataaaagacaccacaggctatagtgagaggtgagacagcacctggctgtttcctgcctgcttacccttaaacaatgtggtgctttcttcttttaatttacagaaaaatgtgctggcaagtgcttttgtatacagttaattcaatcaatgaaactttgcatcttaaagatgtaaactaatgctcacttcaggaacaataattggcaaatttaaaaattattcatttttataaacatgttaatcttttgctttcaagattttttgtgttcattaactttgttagtactcagaactgactgaaatgattctaagtttgaatttctataattatgcttgaatttcaaagcctaccttgcataggatggtggctagggcataaatattacatcctatctccagttaaggcatggatacctgcaccatctttcatatgagaagcatcaacacaattctgactataaaatttcatgatcattctttccacctacaacttttttggatctttagctacgaattacatttaaagctattactgtatatactttttctgtacttaaaaacatatttgatagaaatagcccacgtgttcgctgtagaaaaattagattacattaggcacagaaattaaaggagaaaagccacccataattccagtactaaatagtatcaaattttgaggtatatccttccagattattttccatagatgttgaggcatagtacagaaatgggatcacactctacatacagttttgtaatctgtgctcctcagtcagctatttattacaataaacacctgtatattcatatacattatcatctgtagtagcctcattccattgcatttttatagcgatactaatttaggtaatctgctattgttaagtatttaatttattcactaggccgggcatggtggctcatgcctgtaatccctgcactttgggaggtggaggcgggtagatcacctgagatcaggagttcgagaccagcctggccaacatgatgaaacccgtctctactaaaaatataaaaattagtcgagcgtagtggtgggtgcctgtaatcccagctactcagcaggctaggcagaagaatcacttgaacctgggaggcagaagttgcggtgagccaagattgcgccactgcactccagcctgggcaacaagagtgaaactctgtctcaaaaaattattcacattgtttttattattatgaacaaggctttgactgtcatctttgcacatccatgtgtctttttttcatactgattcaaggggcatgtgtgtttatcaggcttttgatgtatttgccaaatacatcaaatatctagaaatagcatgctgactatactccctctggcaataaatgagtgcctcaaaactgtatttttttttcttttcatgtaccatctgatagacaaaataggcatctccttattttattttttattcatttgttttctcgcatggttgatttttccatatcattaatttaaaatttttaatttatccttttttgtaaattcatgattattttctctctctctactgggacatatttattttccttactgatttttaagagttctccatgttgtacctctttaactataaaatatgtaatatgtaatattttcccaggttgtattgtatattaaaattttttgatatatagaagtttttgttttaaaattgattaaatcacaggctggggatggtgactcacacctgtaatcccagtactttgggaggccaaggcaggcagattacttgagcccagaaatttgtgactagcctgggatccatgaggaaactctatctttacaaaatttttttaaaaaaattagcccagtatggtggcctgcacctgtagtcccagctactagggaggctgaggtgggaggatcacttgagcccaggcaacaggtttgattgcaccactgcactccagtctgggtgacagagccaaaccctgtctcaaaaacaaataaatagataaataaaattaatgaaatcattttattcatagtttatgcacttagaaaagcatctggcatatatagtgctcagaaagatcttcctcacccttagagaaataaaacgttcacatatattttctttgagtatttccatagcttcctttttcatatttaaagtttgaattcatctggactttattctggcataatataagtcttaaggcttattttcccaaatgattatcaagttgtcccagtataattgattatcctgtgttccatatgctgataaaaaatgttaactctgtcaaatatcaaattcttatgtatagttgtatctctttggtgtttctgttcagttctattggattctcttctagtctggtgccagtatcaattattataattattacagaaattactcctttgttaatattgtctttcagaaatgttctggatatatttacatttatttatatgaggtcttaaaatacacaagcaatgggagacaagggggaattgcaattgggggtaaataaagcaagtttggaaaaatgttgatattgttgtagctgtgtgatgggaatgtgggactcatgatcctatttactctgcttgcatgtatgtgtgaaagtgacgataacaaaactttatataaataattaggtaaataattcagatcggaactgcatgtaattggaattgcacatgctttcctctttagaaacatgttttttaaaaaaagtctccttttatgtacttcaatgaagttttgtagttcatttctttatatagtccctctacctttctaaacaaacaagcatacaaaacctaagaaagcttcttcatgcctagtttttaagttgtgtgtgtgtgtgtagcaattatatttcaaattgttggtatataggaaaaccttgatttgtaatcaacccagttacttaacttaaaaaaaaaaactctatttctttctttttttttttttttgctttctttttgggaggtttttcaagtagagaatcctgtggtcttcctatagtgatagacttgcctcatcattttcaatatttatgattctcctttatgggatttattagctagcactttaaacacattggcaactgagggtggtggtagtgggtatttttctgctgctcccggctttaatgagaatgtcttccatctttgatcactaagcaagacattggctatttgagaaagatatgacttttggtcccgttttattaaatcttaaaaatcaggattcagtgttaagtgttttcacatgcattttagacattcttagaaaggattatgtgtttttcttttcccttggtctattactttaatgagttatattaataggtttcttactattaaactcttctcacattccagagtgtgtaaactcatgaataatatggatcttgtgtactgtcttacagaaattccctaaattgatggcatttctccatgagttttctattgtttcttgcttctaagtgaatttgggagcaaggagagtgaaataaatggactgaaatttctatcttatactggaagtctggcatacttgcattgactgtcatctacagtagagtcaaatgtactgactgaaattcagctatggttaaagaatgtggcttttatttcttatagcaaattttctagctctagattctagctgtagagccatgttcccattaatgaggtggggaaaaacacccaaactttaattcatttcgggattagaatagtttcttttgggtcagtatgtaaataattgaaagttgagctatatatcagaactgtttttctcctcttcaatgacttctgatgtcttccctaaaacataaaataacttctgggtgcaggagaaaacatacatatcctggatttatacttactagccatgtaatcttgtgatgattatttcagctttctctaccttgatttcttcatctgcaaattggatattaaaatgacaactattttacagaattttgtgggaattgaattagttaatatattttaagtgattagaacatttcctggtacatagcaaatgccccataagcgtttgtaattataatataaaattatgattgttctcatagtgttaggagtgaagtggactttggttcatgtgccattttccaattgagtgctcttgggatgatttggtgtctgtctctcctgcctccactttgaagtatctgaagctggtttaatactctaattctgttctcttgccataagcaaagaataggaattacatctgtttttgccaactaggttggcacccaactcttgctgggaatatggggtctctttccttagtaatatttatgaatgagataatctgtaacaatatcttggtatggtatgatatgttgtgacatcatcttcatcttagcagagtttggatgagttagaaactgaaagaccattttaatactaagtttctttcattcagctacttctacttcagatattaaatttggttttactttttcatttatatgctttcgcttatattacttctttagtgaattaaagagatttttaaagagaaaattctagcttctcaagcatcattgtccttctgaaaaattgaactaataagccctgagatgattaaagcgtagccgatccttagaaaagaaattgccattttccattttcactaagaaattcatctattagcacaataatatttatgagattttgctgttgtgcaatccctcattcatcccttatcaccattttgaatgaagagagagcaaaatctaattccaggtgccagatgggtgccacacaaatggcaatgattcagcacaggctccagttacagataccaagctctgaacagctatttggataatcaggagatcttggtgaactgaggtgaattttcttctgtgtgtcaggtcctccacttgttctttctctatattcagagcctttgaatttgctatgaagcttggtatctgctttgtcctagcagttaagagttggtgtcacaattcacatcttgctggaaaagtgatgggttcattttgaggctcattgaatgagtccttgaagaaggaagcatcaaaatgaaaaggatttcaaatctctgagtataaggtttgaaatgttcatttgacctcactgatggctgtggaaaagcctaggcttggacacagaaactgaaggttaaatcttgtactataattgagtgtctctagaattagtacaggcttctctcattttgtggcagtgtaacagcagactaacaatcctgggaagagtgcatttttaatgaaacatttttgcagggttagtaaaatccagatctcctaaaaaacccaatgcttgcttactctaagatgagaaggataagccaaattcaaggcttctcactatgccaccaggttatacaataaattttgagctcccctatcctacatttcgaaggattaattctaactgtaatttaccttgattcttagagctcgctgaggctcttggtgttaaagacatatcaggggacaaagtaataaaaagcttacatttaaggagtgccttcttagagttaggtacagtggttatatacgctgacatgtaagttcatcatttagtttacacagtagtagccttgaaatgtgagtttcagtatctacatttatcttgatcctgacattgacatgcaaaagggttaagtagtttctcatggccataaaattagaaaatggccaaaacagaatttgactccaaattctttggaatatggaatatgactgattccaaaacctaatattccactgattagttttgtctcttcatctctccgaatcaacatctcttacataaattacttttgtttaggggatatcttagagttcttgttttataatggagtgagaaaaaaatatctccttaagaacaaaggaattaaaacaaggcactacattgaaggagtttattttatctaccacatatacactgaatatgaaagaaaaagagtatattgaaaatgattctctaatggcagaaaaatattataatttatgctgtactagatcttgattttgttgcttgttatttttaatgtctataataaattggtaaaacagtaaaactcttgaaaagcaaaaaaaaaaaaaatccaaattctttgcccacttttttttctgctgttattttatttttaatgtaaaaaagccaactgctctttatcattcgttagaaatttgctccaaactaaggggcatgtacagttttcaatttgtgggtgttaatgactccaccacagtgggctcattcccttgcaagggcgctaacgggctgttgcttcctaagagacagaggattgagaggttttggtttctactcatagtctttggtttcttggctctgttattttccttgtttatgtttcttttaattaacattgagtttcttcattttatgccttgcttttcttctgtttgtacagtctgccggcaatgactccttgggtagcacttgttaattagggagaaatgatagcttgagggtacttcctgacttacttggtgctaggataaaagttgttctactgaagccgcattagaacaacttttatgtacctacctcaagtaagatctgcatgatgctctaccaattcccttttgtctctttgatctttactttaactctggtttattttatttaaattctcattgtgtcccaaataatctaaaccaagagtattattaggtcttaaaataattcacttgtatttttcttaaggaggctattcacagtagattttgtgggaaaataaaaattagaattcacggctgattgactaaataaaagcaactaaagaaccaaagggtatgttgattttaaaaaggaacttctgaaggtatctggctcataattacccagagataataattttggttctatagctcagattgagaaagctatacataatataatgcaggatctataacatggattgtctttctcaatttctcactattcctcactctcacctttccttctctctttcagctacctattcctatctaatctatctatctatctatctatctatctatctatctatctatctatctaactgtctatctatctatctatctatctatctatctatctatctatctatctatctatctgcctatcttgtttttgccagagaggcagaatggttcatgttttagaacctagttggtctcatgatacaaagtacagactatgatttgtaattaatgatttgtagacagcagtctctacatacattctacaaccctcagtgaaatgccatttctaatacttctcaaatttacaagtattcagacagcagattttactttaatatgggacaaaaaaacattaaaaagaataaaaggctcagtgccttgatgaactccacttttctttgtagctagtaagcagcttgcaccagagattttatggggatcatcttgctatcattttattttcctcatgatgactcagggaattttatcctgaggctctcaatggatctgttatagtcaagctgatgatgacacatctcagaggctcattccatattgggcctcaggccagcaaactacgcaccatgctgtcctatgattcacaggacgaaactgctctagacacctcccactgcccaggcaggaagggcaccataatgaggcagtgggagggtgtatggctaggaaagttgctaaaaggaagcttttgttgtaactttcttctctgctgcaggaggctaacaccaaagcaaagtattatcaagcaacagaccctacatttatgcaatattaatgagaaggtccctggacttttaattagggtggagagttgtgttttagagagctgaaattattttaggtgggaggaaatggaatcctgggagaaaagtaattaatttatagctcaatgactgaactgtgccattttgaaatactggtcaaggtgagcgttgaaagagtgggtactctggcatttccatacccttgggagtgaagaattaggctatttggggagccaaatgatatgcttgtatttccaaaaatgtcatttattttgtaataaatttgtgctgaaataaaaagtggcttgtgttctctatgtaagtgtgaccgcctgcatattattcattcaatggtcatttacagcatactttataggtgtggaattctacagatgccttttctacagggacaaagttctgactagatgcacaaaggagatgaaaagaaccgtcaatgtctactttcatgttcctttccctctacgtggggaaaaacatcagtatatgaaatggcatttgaataacttaaagagaagtgttcacaagagcagaataactcggaacaggctttgaagccattaggtgtatgaatcatttactgcctcctcgggggtcccacaccagctattctgagattctgtcagagcacttagtgtattgtgttatttgtctctgtcccccactagaatgagagttccacgtggagagagatttttatcgtatttatctctgcatccctggaccctagagcacagttcattgcataccacaagtgtccagtaaatgtctggtgaatgaattagtaaaatagattgctgttatcattttggaggaagagaagggaatagaatgatggttttatatggacataaactacaaaggaaatgatttgattcttttcagtctggagacaaaatgtgcttttcttctcttaattctctgttcaattcagcagaaatcagtaaacatttactaagcatattttatgttgtaattgtatatataaacatgaaatgttttctaacctcaagggacttagagtccagggcaaggttggcagtgacgtacaattaaacagatcattttgatgtaatttgacaaatatactgtgggaggcattcaggaggcattatggagggagtaaaaagggatgttaggtcaggctggcagtgggaatggggctgggatattgggagaatcaggaaactcttccaggaggagatgacacctgagttgagtcttgaagcaagacattcccaaacaaaggaagaagagcatggctatggggtaaaggaagaggggaaaaagtccaagacagaggacagggaggtgagaaaccgtatggcgtatgcaaagaattacaagtggttccctatagcaagtgagtgaaacaatgctgtgtgggaggtcaagggatgatactgcaaacagcagacagggggactcctacttaccatgtaaaggagatttatttggactttatgctgtaggggataggcagctattgatagattttaaggtggacttgaagtaggcagtattggtgacaagaagaacattagaaagtgcctgaatttgtgtagataaaactctggaagactgtggtagtggtagacccctcttagtgtatgagatatgtatgtggcgggttaaagtatacacatggcagctaaaacaatgaaaactagtggattatcaagaaatataatctagaacagaggctcccaagtgccaatcaaaagtggtggtgctcttcacccttcatgattattatctggggtattggtcaaaagtagattcctgagtacctgtcctcaaagttctgattcattggtggagagtcagccatctgcattttatggcattccctagctaattttgatatgcagtcatgtttgggaaatgctgataaaaataatatcaatggtatcactcatattttagatgtagacaaaataagaagaccccgtgaagtagcaagaagttgagcagtcagttggagaaccagcagaagacagaggaagagggattttctagaaggcaaaacaatgtgatagcagagagttctagtcagataatttgtgaaaagtttgttagattttgtgatatggaggtctaggatctttagagaaagtagtttaagtgtggaaggagtaaaacttgcttgcattgggttgaggggtagacagtgggaataaggaggtaaagaaagataacagacattttttttcaaatagcttgattttgaagagaaagagaatgatatcttgaggagggagaacatagggttataaggataatttactttttacaagaggagagactcaagagagtatttagatcttgaggggagagaaccagttagaactagagcagatggaggaggaaagacaggcataggtagaagacaggactcctcataggaggagaaacacctcactcatcctctcagacagcgggaaaggaggtaagggagagtaagctgggtgaggaaggaagctgaggcataatttttgatgggatgttcagagagacattaagaggctcaaatagttgaaagggtacaaagctggttgaaactaaacctaggtaaagagccctattgttaacttactattttaaaaatatttttcttgaaaattgtgacagctttttcttttctttttttctttttctttctttttttttttttttttttttttgagacggagtctcgctgtcgcccaggctggagtgcagtggcgcaatctcggctcactgcaggctccgccccctgggggttcacgccattctcctgcctcagcctcccgagtagctgggactacaggcgcccgccacctcgcccggctaattttttgtatttttagtagagacggggtttcatcttgttagccaggatggtctcgatctcctgacctcgtgatccacccgcctcggcctcccaaagtgctgggattacaggcgtgagccactgcgcccggcctgtgacagctttttccacccatattgcatttattttctaacttataataatatgaacctattttgtagattgagctcctgttggtcctataaaacccaaatctcttgcttgctgattcagttgtttatttgcatttgtctcatgttccatgtgttttgcattcccggaaactagcacaggcagggaggcctcaacacctaatttatttcctaggtgaagtggaacctgaagattttccttttatagacaccattactagatctgaaagaaagaggtaagttaattgacacccaaatggaggatgaaaatagtagagtcaggaagagagaacttaattttagccatctgttttccaacttggcttttctcagtctatagattcccaaaaacaaagtctaacattgggtacgaaatagcaaacttgagcactgaaaaacaaacaaatgagaaagcaatctaacaattccacgaacaaaaaactagcacttttgtatgtcctctgaagtaagaagagatgagtaacttttgtattcactcaaatactttcttttaatccaacttttaagtattttttctaagtgttgaaaatttgagaagccaagaaacatagaaatgagacagaactacccataatactgtacctaaatataactactaatattttgctaactttttcagtcttttctctgtgcataactttttataggataatattacacatacaactttaatcctgcctttttcacttaatattataacacaagctttttctcatataattgaaatatcttgcaaaatatatgattttaattacatagtacatcatgaaggttctcatattttatttagcaattcctttactatttgacatctaaattgtttccagattttcattattttaagtagcactgctggaatgtttctgcatacaaagcactttccatatttcaagttacttcctgaattatgatataaaagtgtataataccattaaagcttttggtacttattatcaaattcctatccaaagacttatgtcatttggaaagttgatcagcaatatatgaaatgcatatctaattatatatacaccattttcaagtattttatttttaaaagtaaaataatttttaagcaagacaaatcttgagattttaattttcattttattaatagtgagattgaatataccccatattttgatataattttatttccaattttgcaaaatttctacttattaattaaaacattcatttttgtagatttatacctctaatttttaacatattttgtaaatggtacaatgtatgttacatattaatactatggcaaaggcaaaagaatgataatgaattgctttcaaacttaaatatatatatattttttgagatggagtctcactctgccacccagcctggagtgcaatggtgcaatctcagctcactgcaacctctgcctcctgagttcaagcgattctcctgcctcagcctcttgagtagctgggttacaggtgcctgccaccatgcccagctaatttttgtatttttttttaatggagacagagtttcaccatgttggccaggctggtctcacactcctgacctcaggtgatccacctgccttggtctcccaaagtgctgggatgacaggcacgagccactgtgcctggtagaagttatattttttaatcatacaacttgcagtatggaagagactttacaatgtaccttattcaaccctgtattattagtttgttttcatactgctataaagaactgctcaagactgggcaatttataaaggtaagaggtttaattggcttacagttctgcatggctggggaggtctcaggaaacttacaatcatgttgaaaggcgaaggggaagcaagacaccttcttcacaaggaggcaggaaggagaatgaacacaggaggaactaccaaatacttataaaaccatcagatctcatgagaactcacccactatcatgagatcagcatggggaaaacagcctccatgattccattacctccatttggtttctcccttgtcacgtggggattatggggattataattcaagacgagattttgggtagggacacagccaaaccatatcaatgccccagttgaagaagcaaagattaaacccataaaacaattattgaaaaaaaaatgttagctagtagatgagtttgtggtacaacatactttttgttattggacctcagagtcagtagaaatctatgtgacttggcgcagtaggggaagttgttattagaaagaagggcttttgttggactttgaataggaagagttctgtaaaatgaagagaacaaaaattaaagggcatgaatctaaggccaagaggtagaaatggatgtgtctcaggtgcggcagagatgagaccagcctggagggtagagggctggtgttgggagatacagtgtgaggtaaggccaaattaagcatgcaaatcacagatcacttgactcttctagttgaaacacatcactctggagttcctactgagcataagctacaacctgattatataaagccatccttgtggttacaggtagattgcactgactttggcaagtttcaagatgttaaactgtgctgggaagactacaagatgggttgacagataaaactagttttaggaaaatgcatgcacagggcaatattatcagctagccacagcaatggccatggaatacagggtcctctcattattgtgttgtcccaggcagttctatgaccttaggcagactacttatgttccctatacttcaattaccctatttgtactctacgttctttctaaatctcagattctatagcctctagcaggagctcagataaagcatagcttcagataaacagcactctagagaaaagagagaaaatgtaaatagcaggaaatctctattgtcatctttagatctggaataagaagtcctttcttttaattcacaattttagaaggtatgaggagatatccagaactttcttcccttgtttctgctaccaatgtagcagagggccaactgaagcagatgttcacattatctatcttacgtgtgtagagggcaaattagtggacatttaagagcccaaggcaataattcaaccattcccatgaaaaatctgttattccatccttgtatgtttcttttcttttaactttttgagtatttaattcttgtgttgcctcctcctaatttccttcctgcagatactttggtgagtaaaccttgataaattaagcctgtttttattatattcctttggagttgtctttgattgtgatcaagcttctctttttatacatgccacatgtattcattcttcatttagatgagaatctaatcaagggaataaactgccaagtttggtttcatttatgcaaccctagaaaaatatatcttttgatgagttggagacaacagtaagttagagacagagctaatccattacaccttgatcactcagaggcaactgtacccaaacaattctttccctttgcatcaagaaagtttgttgtttatctgagagcttagtactgtgcctggcacatataaggtgctcaataaactttttaaaaccaatgcatctgagtggctttataattcagcagttactgtatgaactgacttactatgtagaagaaaaaagtattagttcaaaaagaggagattaaagaattcttcttacatatataaaacatgtcctgttcagtagcttctctaatattttgtggatgattggaatcccttttcactcatatttaaggatgtcattatgtatggggacatttgctgtttcaatacatagatttatatttgcagggaacttaaagtccccggaaatttttctgagatattatctgattaatccccataacaacgctgtgaggtgggttgtggagatatgaggggaaaaaagggaagggattttcctaataccatacagtttgtgtatatgacgtagcaatgaaagtagaacttatttcatctgatgaccagttcaagacattttctgctatataaatctttaatctctaggatagaaactgtcttaattccctttgcattgacacagcaaaatgtatataggtggtccatctaattccatctctgaatattccagcactatctgtcttatccacctcctctattcatttttatttctaaagtgttctccctgcaggagctgactcttccttctttctaattaactttatgtggaaactcctatcgtaacgaaattgcacgtgtgagtgttctctcgcctggctttctttttagtgcacctggagggagaaagcttttctgcagtctcaccacattatctttgctgagagagaaacttgcaggaactaagataactgccttcctgagagtcaaccttttcatcaaacattctttagtttaggcacagctttgatttttgcagaggttaccacttgttcataattaaaatgcactggttcatgctattggcagcaaagcactatggaagagtagacaaaaacgtggattttgaggcagacaaatcaggtgtgaatactggttctgccattcctgggcaatttacttcattcgttgctgctgatttcctcgtttgtgccatgggaaaacatattaacaatgtctacctcacaggagtattggaaagtttaatgatacattatagagatttttttaaggataaatgaggtagcagaacatgcaatcctcttcatagactgcagagcacatctaccatttcccctccatctccactctcctccctgccctaccttggggggctttgaaccctggaaggctgaccagtcagatgtacttcttcctcctttgccctcctgcttgcttgcatttggttagtggggagtcctaggaggagacagatggagaaaggaaaatgagactgcgtgcaactggttgtcttcttctttttagggtctagctgtgtcccagagagcaacttcccttttcaaggcagcccactctgtgtgatgctttttcctaggtatgggcaacccatccctcctagggtgaaaacttcgctgttgctagttccaggtactgtgccatcctttgtggattcctctaccctaccaacatctccttaaagagtctctttgttgaacctgctgtaaatgatcctaataaaagtatgctgtctgtttattcttggaccttcaactggtagattattcatactggttagtggaaagtagatctgcctacatatgtattatttgagagaggttagcacttatagaagaaaaaacaagaatgggctgtttttacttgccatttgatactaagagaaaaagaaggtagtgatgatggatgatgataaagatatgatgatggtgagacccaaatacctcctatgagccaaacattctcctagacaatactttttacctcattcattttgaaaacacatatgtgtattattatctttcttttgtagatctggaaaaagttcagataaatcaaataatgtacctaaaagctacatagaatgccagtggagagctgaaattccaacctatacctatttggttccaaagtctatacccttttactgacgctaggtgcctcctagctatacagggtgagaagagccattccatcagcagtcagttttcaactgaatctctctgcctattgaaatttctctaagttctaaattcccataggaaagtatctcttaatgatggtctttaaatgatttcaaggcaaattttttaaaaacctggttaattcagcaaagcttatcaggtcaaatccattatttgtctgatttgactgatttgttaccattgagtcactagcccagtagggcaactattccatggttgtccctaaggctactcattaaatcctggatgaataattaaatattttgaataagtttttctctgataatatatgtttcctacggctgttatctaaagttttttctccctagatatggaatatttcattcagtttgtattaatttctgtccaattcctaaattacatgagtaacataattctgcattttctgggacctataggatgctaatttgtaaaggtgattcaattcctggaggtgtactagctgagaactttccattgtggatcagctcctcccttcaaatcctactcctttagaaaaaatccatacacactcagagaaacagtatttatcttagcaactcacatttgattgtgcatttttctttaatcttcaggcaagcatttctatcaaccttggaagaaggctttgtcccttgtttccctttgagtccccaagttgcatccagagatattcttagccacagtgaaccttacttctctgtttctacctctactttgctgttacgggacctcttacctcccgcaaagtgtcttccttttattttgagaagacttgagagggtgactcacatatattccaaacaagtattttcagcctttaaaaaggctgtgttccttgcaggcttctctgctttcattttgtatgtttttttaaaaaatgatacatagttactttgttttttatcttttaaatgtataattcatactactttgtactttaatattgtcaatcattttagcaaaaccagctccttcagaccttaatcactgttactcttttccttaagtctcagacacatgttttttgagaagcttacaacaaacccaaatgatagaactacatgctgctgttagcatcagcctacacctacactattagcctaaacctgcaatatcagagtttttgtggtttgaccaagccttttatcctctttcccttacagtaagttctttcccagaaagaaaatatcagcccacatgcaaatatatcttataaatatgtaggttgtgtcctgatgtagcagaatatcataaatgaacacagcacatatagctattcgatttgttctttcttcaaaactcaaaatggagaatctccactgtagtgtctaggagaaagcaaagattagttaggtaatgaggatgtcaatgtcattcaagtggcaattactctggaatattccttgaaataacagttactgcttacttaacagttattgcttatactttttgttctcatcttctcaagtattccttacaaccactaagaactaaaggggtagataactcactaaatttactgaagagtcattggattggcttcaaggtactattgattattgtcagtgaaacaagacgcaatgatgcagttgctcagagggctcttttcttcacatgtaagtaagattcctccagcagtggatcaccttagtgatcccttagtgaaaaattgtcgaatccttagctgtcccaacaagaatcaacatatacacaattcagtttgcatcttcattttatacatgtaactttaggttatggctatcatatctgttttttttttttttcagccactaaaactgtagagttgaatatttaatggaaaacagatggtgcttgaaatctctaacttacatttaacaaaagctgttttggaaatgttgcttatgtatacttttttattgctttaaacacagcaccgttttagcctgttccgatgaattatttaagaattaactgtcccagtctaagacagcatttcaaagtgcaagtgttaatcataacttgattaaacatttccttccttttcttttcagcattccagttggcttttgagtggatacgtgcagtgagatcattgacactggaaacactagttcccattttaattacttaaaacaccacgatgaaaagaaatacctgtgatttgctttctcggagcaaaagtgtaagtaacttttgttttcatctattttctaaacacatgtacatataacattttagttttggttttggattttaatgctatgctatcatgattaggcttgtgggaaacgtttagtcaactttcagttctctgactgtacacagcttattaacaaacaaagactagtttgtctgtgtgacctgttagcatttgatgagaattctttcagctagtttatatcttaccattcattcatatacgtctacaagcctgatgttgaacactctaatttttgagtgcatgcagaaaatatatgattaaaagtcaaaatatagggaatttatgtcttgaatatgaaaccttctgggcaagtctaaaagcataaattatacttatgttattagttacttcaaccagtcacattctgaaagttcttcccttctatgagctttctaccctggcatatatctctaatttcttcttttaatctttttttaaaaacattttaaattgaacatcctcagggctctactgaaggttaaaccttatttccaattatgtagtgttcttaaggtaccacagtcatgatactttttaaatttatattagtgtatggaaaaaagcaaatagagcaactcaaagaaagccacacaaggaaaggatgaaagcagactattaatttccatcaagcaagcgctaagaacacatccctttgttcatttacccaagggggataaggcatccaaacagatgtacttgtgacgtaggaacattaatttgaaggcatcagaaaaaccacaaatgcaaacacatttctctagtatgggaacactttgtgttataaccagtgattctattgtggtggcccaaggccatctttcattctttctatggagttaccatccagcttttaagggtgaggcatgagtatgtgcagataaagtatagtatgcccaactgtgtttgttaaaaaatgaggatatgctgagagatatgccaatcctttgactgaataccgtgtttaataaccaaccaagtaaattcaacaaactctgaggaattgttcaaatttatgtgttttactggttggtgtttggttgtatggattattgcataaaagaaggggccatggatttgagcctggaattccttttatcatcatacaaagtcactcactgtaataggaggtgacctgcatacaaactaccaaactgcaaacacatctttctcttactgagttttcttattataaattaaatatgaaagcaaactattcatataatgttttctgttattgaatttcagagacatgagatctgaaaaaaaaatgtgtaaaggcaaaagggaggatattttgaataattacaaatgtcattaaacatttccctattcttggaggaaaacattgtaaaagcaaatgattaactgagcggtgactttaaggaactgagactacttaatgatgctaggagacttcctatttgtatttgtttaatgcaaaaaattttatcttggtggaaaggctcaagctttccagattaagagaacctgagttgcctacatttgtcaaaatgtaaacagtagaactctcatttcactgcttcctagcttcttgagaatccactggcataaagaaaatgcttccacttaattaaatgactctaagcagaagttaatgtttatcagaaaaaaagagccagacttattgcctagttagaagttgtcactttagggctataaaattttattttgctctggtctgagcatataaccctccaacgcttacgtttttgccataatataatccaaaattgtatacttagaggtagatttttcctggttttgatgaagaaagtttaaagaattagttctctttagaatctgaggatgtttatctttggcattctgacatttggaaatccaaagaaaatgttcgaaatttaaaacagtctctgttcctccctacatgcctctcttgtaggtcttgcatctttcattgtgaaaatttaaggcatacaaaagaggtagaaaaaagatcatccttaaacgatcaccttacttagtgagttcctctcatgagaggggttccagtgtgtcttggaagaccatttagtcactcttcaactcaaacaattcaggcataagatgggtggttaaactatgtgagtgttctgtttcctaccagttatgaatttctatgattctataccatgttgtgctcattcgtaagttgaatcaaagaccagttcccaaataaatataaaatcaaggcatcagggcaaacagagtatattaatcagcttgggctacaatataccatagactaggtggcttaaacagaaaagtattttatcacaattctgcaggctgggaagttcaagatcaaaatgccaaccaattttgttcctggtaagctctctcgtcctggtttgctgatggcttgccgaaagctactttttccctgggtcctcacatggcagagagagaaagcaagatctctgctgctgcttcttttaaggtcactaatcccatcattagggccccaccttcatgaattcatctaacactaattacctcccaaagaccccacctccaaaaaccatcacattgggggttagggcttcaacaaatgtatttcagggggacacaaacatttggtccataagagagtttgatattcttttttttttttttttctgagacggagtcttgctctgttgcctaggctggagcgcagtggcgcgatctcggctcactgcaagctccgcctccctggttcacgccattctcctgcctcagcctcccgagtagcagggactacacgtgcccgccaccacgctcggctaatttttttggcatttttagtagagacagggtttcaccatgttagccaggatggtctcaatctcccgacctcgtgatccgcccgcctcggcttcccaaagtgctgggattacaggcatgagccacggcgctggagtgcaatgccgggatctcagctcactgcaacctctgcctcccaagttcaagccattctcctgtctcagcctcctgagtagctgggattagaggcatgcgccatcacacctggctaattttgtcttattagtagagacagggtttcaccatgttggtcaggctggtctcaggtgaatttgatattcttaagggatgattgatttaataagtcactgtcttgtttaagcccaaagggtagtgactagtataatggaatctgtatgttttcccaatttggtaacactgaaaatgatctggtcaacatctttctcttcatttcttattttctaaattttatgttagggacattcttaccaatgatttttgaagtctaataatcacttcatagacctagaagctaattttaattttactgaaaatgattttcccctttcttcactattcttagtttgcttattttatattgttctttcttaacatctaatccaatgacaggtctctgaagtatcttgtcctatcaatggatttactatttaacttttcagatgtttatatatttcagaactgactatctcagttacccttcttccctctgctaatgcctgctttcttactggcttttagctaatcaggggagggaaggaaaggtacagacaagagaacaggatataaaaatttttgttgtaattatatattttaaaatcaggagttaaagtaaaaattttagcattttcttttctttataatatccctgttattctccaaactcatgaagttttataaatcttctcatctggagaataaactagataaattttaattcttattcattaataaattttcttgtgtattaaattctaaactttcttgtagtcttttgcattaaattcccaattttctagtacactgaatcattttcttcctaccagtttgaagatattcaagatgtcatctacttaattggatttgttaattttcttgatgaaattgccctttatttgacttaggattcttatggatgttctacttttggataaatttgtcactcaccagatgtctttgatgttccttgttcttttttgatagaattgttgttcagtgttcattcaaaactggaagcaactccttggtgtttggaagacatagggtatctggcacattctttcataatgaatttaaagcccacctaaataggctgtcagttttgagtctgggggctaggagcccatctggtgaaatttttcccagtaggctccctagaatattgcttattttcatggaagactttaaaaaattgtacaaacttggtaaactaaagtgattttattcttaagaaaatatatatttttttccatctgtacctttacattgctgagtttttagaagcagtcactcacctaatgacccagggtgagttatttatgccattttatctgcattttttagtgtcttcctggagtgggcagccaaaaaataaatttagaaaagatggtacattttgttatggcacttcagagctatctgcattcatttttcctcacaattaccctgtaagatagagtattttttatttgtatggttaaagtaaaaataacaaattccttcctagatgggcttcaattctctactatattcaaccccacctaagctacgagattgacaaagctgttgcagcttagaatcctaataaagttaaggatgtataaactgatttttttcactggtattcactcagcagggtccaagaaggtcacgggagatgctgtaggtaaaatcctttgaaaagcacaaaatacaaaacaaaaccaagttcctgcttgtgtctttattcacaacaaattgatatgagaagttgtagttttagagatttcactcctttggtccttatacctgccttccagcttgttctccttctttacaaagttctacaaatatttactgaatggctactgtgtgttaggctctgagtatccaatgtaagatacatgttctctctaccctcatagagcatatctgataactaaatttataatttttacaatttgttaaaattatttcaccaccctgtctccctaaccctgatcacctaactgtatcccattttaatctttaattctttttaggaaggctgaagttctgtatctctctgaagtctctctgtatttgcacttcatcacgttgtgggcaccctgtttagtagggatattttgagctgtgaataatgtgctataattgacaattatgctcattgttgcagaaacatagattatttcagagtagataaaaagaatttttctcagataatcaacaatagtataagaatagccaagagtataaataaatgtgagaatgacaggaaaggtctgaaagaacagcgactgatcagcaaccatttgctttaaatcaatcacatgtcacatgactgttttagtggccaaagccaatcattaaattgtcatcttggaaaaagttccacttttttctgtactgtgatgtgtttgctatttcatttttggacaatttcaagttgaagttgaattacaaatgattacgtccaagaaataattgcatatattgtacttaccagtgtaaacaccacagatacaaaaaaatggagagaaatcttgttgcattgttaatgaatattaaaaaattattcttacagacaaaatctctctataacaaagtgaaattttgaagaaaagcataactggtggagttttctatcagtagtatttgctctagaaaaatgtttataatggctgcttatttttaactgaaggtaattttcttttaaaattttgtttagctttttttcactattgaaatggcaaatgttttgaaaactaaaaaattgacttcaattaaaattattagtgtgtttacattgtttcccatggtcagcactttcaagggcagaactggaattgtccctgagttatagttctggctttgcatctgtgcatctatgtcttggtagaagaagtgggagtaagagaaccataagtaattagttttattatcaaatgcttccaatagcttgcataatttttttcaagggtaaaatgagaaaaacagcattgaaatcacattaaaaaataaagcaaacaaaaaatccaaaccaaatcatcaagcagaaatcattttaaaaatgctatacaataatcaattgtgttcaatacttctgcgccaaaacctttaagtcttaaagctttcctaaatggaattagtccatcaataagcagataacaactttacttttattgttgaaaaatgtcactcttgtcagttcacaagtttccctaacttgtgcaaattaaaagccatgacagcaaggccaagaatggttcgttggtatatagttagagagaccctgaccctgctttcttgttcttcctattacccaggatatgtcatacgccacacacatgggggtagggataccgccctacttatagcataagaactgagaataagacatttagcttataactcttttatggtaatattcccctcccactgccattcttcctactcaggtagtctggacttctgttttggcaatattgcttccgtgagaaggatttgactgtacttgcagccctcaacatcctgaatttaatacaatctacgatatttgttaagccctcaccaactatttgaccaaactatgacagttacatcccacggaactgtataccaaatggtaccccagcagttcagagagttaacacaccaccaattcacttccaggttgggctttaagattttcagaggatcttgcttatgaaatcatattggcttttagataaatgtattaaaattactgaaaacaaatgataacaccacagtaccacaacctaaacaatcctttctataaattaatttaaaacaagaaacaacaagctttaaatgtcatcatctctgcttattgtatgtccttaaaaatattattaaatgtccaacttttatttttctagaagaggtcattatatagcattgatttgccagcagggttctatttgaacataccaagagacctagacattgctcagaaacagtagtctcaaaataaacaagggattggaggaaaagatgagagatctccagtatgtctgcatataagggctgaaaaagtaaaagtttccaattgtttttttttctttgcaagtgctcatgcagggattcagaacatgcattcctcacccaacataaatgaaataattggcaagtagtcaaagaagaccatatccttgagtgggtagtattgttgtctatttggaaagcatttacatgttttgatttcctgaaacaatgctgaaaatgtcctaatgcaggaagggagaattgaaaacaaccaccataaaatgcaattagatgttggtaaaagtgactcagaatagacgtaagttaaaactttctgacagggttttctagcactgggacagtattttttgaggaaattataaaatggtcttatttcaagatcttttaacaatctgatgaaatatttatggttctttaaatttgtattgttagtatcatactctgaattataaaacatttaaacattttagtttataatctttaacttctcactattatatttataaatgtgtatataatttgtgcatatgtagacattcatgaggaagatgaacatatatgttaattggcatctgctcatttaaaactaaagttgtatactttcattacagtaatacacgtcattcattaaattatcttgtggcttagctttacaaattcttaccgttacatgactttgggtgaatgacctcaccggtgtctatatcactcatgtgtaacatgagaggagtagattaaataaacgaaaagatttctttcaactccaaagctatgacaatgtattttcaagattgtgtacttcttagaacaggctcaataataatttttcacattatgaactttgcagtcaaagaataggttcttcttaacctaacaaatgactatcctttccacccaaagtataaacaggatcctgattaataaattgagttcaaagaatctctgccaagtatgcaaaatcactgcctctgtttgtcggacattcattgcctctaagaattgatggaattgaaaataacctcattttactgggacctcagagaattaattatttaaattttttgctgctttaaacattaattttcttaatttacccatatatgttgctgataagagctgtaatattttgaatggttgtgctttgaagaaatctgaatccttttgctttgtattccaatgacagcagctttgaccagcgaccagctctcttctgaaaactaccattttgacccctgcatttcacctgttgtcccaccaagcctgtctgtttttccattaacagagacctctgaattgttgtgccaaatgtggacagtgttgtttcttcctcactttcctgaattataaccagttccaggcggtaacatgcaaccgaactttactgagtcctggacataatgggaaaaaatcatagtgtagaaagaaaactataggactgaatataaaaaaataatcatttctggcattacaggacaaacccagtcctttctgcttagttactgacctaccccctgttgctttgcttatcttcccacagtgaaatgtctttcttcttatatcctacatggtttccaggccctttactccaggaaagccaggagaaacgccttattccaagttcaagtaaacataataatttacaaagatacaactctgcccacaacaaaaaactccttttacagcgttatgcaaaggcatttagactggaacatctatgttccagacacagaccttaaccagtcttttgtcaaactaaaagagcaatctttcctcaaagctggaataacaccttttcttttaaaataacatttcgtgtctcacactcccagatgttttcatttaagactttagaaaatactgggatcagttatcagccaagagtacccccattctaataaaaatatttaaagacatggaaaaatcaatgaatccaaacaatcatcatcctcaccaaacccttatcatttctataactcacagtaaataatctcaagttctttattttggtaaattaagaaattccagagtaaactctctagcttctgatttaagctcagagatgcagagagcttcagagtgtcgttctcattcttaccataaggaaaaatctatacaaactacctattcattaatttaaaaaaaagcaccagcaaatttaggtcgtagggcaaccaaacaactccaaatctggaaagagacaggcacctgcaagaagaaagaggatggcatcatttgtttttccttgggtagacaccaccagatgtcatgtaaaccagcaagatgattcagctaaacattttaatgaattgctaaggctgagtatgggctagcatgaaaatgtgacacactggaggtggcagatatagggagtgcatcctatagcaggcttttcctccacaaaccccaccaggcactcacaggaaagactggggagaacagcagccaccttcaaacccacaaccatttcccagtggaacaaaagagttaattggcaaagagaatagcaaaaatcattgtcttagggaactggaggaaacccattggtgatggtggcagtaggaagaatgatcgtggtgaggggaagagaaaaaagtaatgctctatccccaggggtggggtatggaatatatgctaggatttgcacaacaattggagaaagttgcaggagcacttgtgaaggccacattgctgatacagaggtacacattacctacctaagactgagtcttaatcagaacatcaaggaatgcccttcctccctggcctgctaccaacagcctaacaagtgttgagtaaaaataatatgggaatatggttgaatatggaagaaattcaagagacacattctctttagggcccagcattaagggaagacccaaagctaaagggggagcaaatattaagaaaataacaactggcaagccatttcacaatctattcctctttaagaatccaaaagtatctatctcagtatctactgtcctacacaagatatccggctttcagcaaaatattatgaccatatgaaaaggcaagagaaagcactccgaagagataatacacataaacatgtgatatatgggacacatataaaaattatcacacaaggaatttaaagtaactatgattaatattttaaaggttctaaaggaaaaggttgaccacatgtgagatcagataggtaatttcagaggagatatggaaactaagaaaaatcaaatggaaatgctagaaattaaaaacatagtcaaagagattaaaaaatgtctttgggcttgttagtagacgtgagacagctaaggaaataatcactggacttgaaaataagtcagtagaaattacccaaacagaaaaaagagtggaaataaaagggagaaagaaagaacataacagagcatccaagaactctggtacaatattaagtggcatgacatatccataattgaaatgacagaaggagaggaaagagaaaaagaggcagaagaaatgtttgaagaaaaaaatcgctgaaaaaatttccaaaattgatgatggacaccaaatcacagactcaaaatctccaagtatatcaagcaagatatataccaaaataaacacacacgtgcagagtcatgttatattgaaattgctaaaaatcaacaacatagagaaaaccttaaaggcaaccagagggagggaatgataaattacctaaagagaagtaaggataagaattacagcaaatttctcctcagaaatgttgtgagcaagaagaaaaaggaatgacatctttaaagtattgaaagaaaaacaaaacccagtaacccagaattctatgcccaataataatacagttaaaacaggaatttaaatttttctgactgaactttttaggttcctattctgtctgatgtccccaaagtaatatgcacctatatcctcattttattttgtctttcctttttcaaatctgagagggtaaagctgtttcttctattcaagaccaacacctctattgcctcagagggttagtcaattgcctcctccctctataggctcaattgcaatttagctaatctctcttctatttctcctttttaccttagtttatgaactagaccatccagtcctttctgtcactcccgtccatgtatatctcttttgacaattctagtatttatatttttctttctagtagttattgctatttccttctgagactgcatgttccttaaacaatgctgttccccaagattcagtcattggcccatgtaatattttaaggtatgaagacacctgaaagatcataagatatctcctttcatgtcttaactatcttctatttgattatctctcaatttccatatttagttcccatttctacttttagtcacagaactctaaccaagtgcttgctggacattcataacatctacacaacatttcccaaactagatgcatccattattcttcctcatctttaaacatactgctacatatcctaaatattttctattatatttactgcctcagctatccagttgcctaaggcagagccctgggaaccttcctcagctccagactcatcatccctcccaacatctaaacaagcaacaagtgttactgcatgtatttgtgggcacatatttctgagtcctcatctcagcttgacttccctttccaccaatgccctggggatcaccttattttttctccccaagatggttctcattaaaatataccacagtagtgataagtagtaaaattatatatggaagctgctgactgttgctccattagctgtttctgtggcaactctattttttcctattaatagtgtactaagtgttttgaatctatgtcttttcacaacttcttttgattacagtttaagatagcctttaaatactaaattcatattaaggtggatctgattgtgtgtgtgtgtgtgtgtaatttctgttacagccatcattcataattcattatttgtgaggaataattatagcaaagactgattagatgaaatgttagattatttattataccagattcgaatggaattaaagtctaatatatgtgttaatgtgactaataagaataacaataataatttagaattgcaaaatgcttttaagtttccatatactattacaacattttcttgtttttttcctttataaaaacttacaggtaggaaaggcagttatatttatcctcattttatgagccttagacagattaggtgagttagccaagatgcacaactagtaatggtgaatcctagatatacttcagttcttctgattccaaattccttactttggacactaaaccttggagccacacaaatgtaactgtaggcatcacttatgtactaatgtacctgttacaccatgtgcctactggagagaaactgtaacatatttatagtcaattatctatatttatagctatcctcacagttggataacaatgttatattgtaaactctagatacttttgcactctatgacagaaagtggattttttgtttaggaagacattttaattatgaatggaggcttgttggggatccctattagcctttgttaaatcacaaggaaggtaaactcttttgcataataaagtattaggatttttaaacttgtcccctgactgctcaagagatgaagtttggggagcggcagtactttggaggactctggtaagtgaatagatataagaaagttctgcagggatagagccacatggcagcagacagggcttaggaagagggactaccaattgtccctgtagcaaagatggcctggttaaagcctctttagaatgaatgagttctagtaaccagttttaaagatttgtctgtttcttttctcccctcaaccctttctttaaactttctgtaatcacaacagcattgtaacaattttgcctcaagctgggaagagaagggctgtgttcctcctagagacaaaacagggaagaaaggtagcaggggcagagtgaaagcaatgattgctgtggaattggaacaactgtgcagaggaagctgtgacaaataattagggttggtgaagcacctgtccctttggaggtatttcccagaaatactgggaagggctctaaatgtcccattgttatgtggggagatggttttgtttattgtattgcccacagaagtctgaatacgttcaaatattttgcatatttgtgtgtgtgtgtgtgtgtgtgtgtgtgtgtgtgtattgaagtacttggcataaggttatgctatttcaaattaacttataaagtaatttggttgatgcaatattctgtgatcaaaatttattgaggacctcaccaaatgccaacatgtgtgtgtatatatatatattatattatatatataatataatatatatatattcactcatttagttctcaaaactattctatgacactaatattttatgtaacttttctatgatacgattattattcctattttttggataaacaaactaaagtacacaaaggagccaatacttacgtctaaaatacctaaaacatacatatttgaaataagagaatatgaggaaaaagtctcaaaattttatgtaggttttaataataaaattgaaaagtcgaatcattttaaaaccttaaagttagtatatggaaatatttggctcaagagtgaactttagacctcttgtctggatatgagtatggaatacattattcagtttcttttttataactttaaatagcttgtaagaagacacctatgcaaatagcaatttctccaagataagtggccatacaggccttatgaccttttgaacatgtcttcccaaatacttcatttctgattagaggatggtcattcagatttcactggatttaaatccacagtgggataggttttaatcctttctggaaaaaatatttataaagcctatgtgagtttcagaatagtaagagcttttattctgtctctccttggatgtgttaacccttccttctacctcagatccatgcatttctctaagttttatactttgtttaaattgagctttcattgtttctatgaccaattttcaatttgtctctactttgcacttcagtagaactaagatgaattctgaaaacgcacaacagccttcatcaatggtccctttctgtaaagagtatctctccccgtacatattcagaacagtataattttaggaatcaactgtatctacctagaaatatgttttatttctctctgtctccaaaaacaattgaaattctctcatatggtttattgccttgcatttacaaaggagccacaaagttcgatttgtgtatactatttttgcttaactagctatctggctgatgtgcacatcaacaaatgacaatgtagtcattccatctttggtacatggagtattatttgataaaaattccactatattttaacttctgaaagtaaggtgattttgaagtatctagaagatagtttctttatttcaacaatcataaccctgtgctgccagatacatattttgatcccaaacttgaaaatatttcaatggttagattattatgcttttcatctgacagattttatggtttaccattttcacttaagctttcccagctttttctcctctttaaaagtaaactattggaagtttcatcatttccattatcaatactagaaattaaagagtcagagatatatgtattctcagaattgtctgaagagtttattgtaatttaataagatgttctcttctgttgtttcatctattatgtcattacatatcatctatgtcattatcgtgtttctcttcatgatttttctggatcactttaatgctctaatcaagtgctctttattttgtgtacagaggcctcattatgataatactatataaaacatttgtatgatgcttttcagtttacaaagtcctcttaaaaaacattaccttatttgcaactcataacaaccttgtacattaggctgtgttattattattattatctgtagacaagaaaacacttttatcaggtaatggagaggcatttaaatggaagattttcaaatccttacctgagatctgttcactcttttccttcttttttagtttgttcccttttactctgtatccttggaattatgtagatctatagtgaaaggctagcctatcagttgctagccattactttaccaagctgagccttatttgactcatcccaagtaatataggtgataatgactacatcataggattgttatgaaaactaagtgagacaaagcacgttaaagtgtctaacacagtaccattttatccatccatatgccatatggtggcataatattctaggttggctattccttaatgctatgtaaattttctttcttctgaaattaaaataattataatacttaatccaaattagactctaaaaaggtcatggtcagtataatttatgaggtaaaaatggcatcaaaaaagaaagaaaaatgcagagtacagagtaaaaactgagccattttctgggaactgttgtgaaattgagtttcttaggcttttcatgtcgataatgcaaactaaatataatttgcaggtccacaaaaagtaaaatgatataaaattatgctaaaatcaagaagaatggaaattaatggatttaaaaaattattgttattgcattctctcaattttttaagactctgtctctgcagtaataaagggaacagagggaaaagtgggattccaaaatagtttatttagacttggaatgcttgcatgcttatatctcactcaacatgaatacgtcttaactaatggggacttaatgaaaactttatattattattaattgattgtggattaataaatgaattaaaaatggggttagaaatagtgcgttatttcttcatctcttgcctttattcagcttttctctttgtccattctacagtaggaatgaattctatctcatagatagatttagaaaccaactccagcaaaaaaattgttgtgctctttgtgagggaagaggttagattaggatgaattaaatatttcagttgaaaaaaatctgagcaaattcatttaagatattttgaaaactcctaaacagtatataaatatatgaaagtttaaacaataataaacagtggaggtacatcttttgtgttgtaaaaaatgtagttgatctttttctttaatgtttccttatttttgtgttttgcttagtgaggcttttctactgcaagattatggataattttgcccatgtttttgaacattcttatggtttttctcttttcccctaaccttgacaaacaaacttcctttcaaatgtcctagatgcttcagggatagctatttgaaatagttcttggagattaataattctccatggcaagctgtcttatccgtattctggtaggttatcttatagaagaggaaaagaaggcaaaatcctagagttaaaaaatacaataaacaaaatgaaaaaagtagtaataacaagtacaacaacaagagctctagtggtatactgagaaacaactgcattcttttgttcttttttcttattttcaatcattatgttgcatgaggtacagccatatgaataaatatgtactaacacatacctagacatacacaatcagccctcatattcatgatttctgcatctgtggtttcagtcaattgcaaatctaaaatacttttttaatcatctgtagtaagcatgtagagactttccttgtcattatttcctaaaaaaatacagtgtaactatttacatagtatttacattgtattagataatgtaagtaatcttgaggtggtttaaagtacacaagaggatgtgcgtaggttacatgcaaatactatgccattttgtatcagggacatgagcatccgtggtattcactggaagttgtgaaaccaatctcccacggataccaagggacaactatatacatatatgtggctatgcggcctacctactcagaagagggttcacagaagaaggggcagcatggagagattcataatgtcttgtgagggagaggggagcctacagtggaatggttagttagaaaatagccaataacttatttccagtgaggaattagaaaacagggattatggaattggaaaaactgaggcattaaaagtcttcctcctgaaattactatgccaagtggaaaatctgctctgaacccctatccaggaaaacattcttcttcaaaagatgttacttttaactttgataagtcttgattagctcttttgggttttagctgttctttcactatgtccacactttacttatcaatattaataaatcttgttatagccagagtggtttgcaacctaaagtagaaaatatctatatctcagggctttgtacctgattgcacaggtagcaatcccaggctaagagtaccccttaatgctgcaatggccacagtagtcttggacagggggatcatgccagtaggtctgcccagaatctctggatagatttattgttgaagaccattcctagacaaatccattctgtaaagactggaataagtatttacttctttagatgtgcagatattgatacatgtcctcaaacatcagatataatcagggaaacatgatgacaccaaatggacagaataaagcaccagtgattgaccttaaagagatggagatgcatgaacttcctgacagagaattcaaaataactgtttgagaaagctcagtgaatgttgagaaaagacagataaacaatttcttttaaaaaaggagaacattaagtgacccacaatgagaaacagaaaaattgaaataacaatttttaaaattaaacagaaatcctagagctaaaatatacaatgaacaaaatgaaaatgaaatagcatcaacagcagacttgatcaagcagaaaaagaatctgtaaacttaaacacagggttatttgaaaatacacagttcaggccgaggcgggcggatcacgaggtcaggagatcgagaccatcctggctaacacggtgaaaccccgtctctactaaaaatacaaaaaattagccgggcgaggtggcgggcgcctgtagtcccagctactcgggaggctgaggcaggagaatggcgtgaaccccagggggcggagcctgcagtgagccgagattgctccactgcactccagcctgggcgacagcgagactccgtctcaaaaaaaaaaaaaaaaaaaaagaaaatacacagttcaaggagaggaaagaatgaaaggaaggaagaaagcatatgagatttatgtgacagcatcaaaaaacaaatgtttgagtcattggtgtcaagaagaagaaaaaaacaaaggagtagaaagtttgtttgaagaaataaaatcagaaaactttccaaatctggagaaagaaataagtattcaggtcaggaaggtcaaagatttccaatcagattcagttaaaataagactattcaatacatattacgataaaattctcaaaaatcaaagacaaagagagggtcctgaaagcaacaagagaaaataagcatacaacacataagggcattttaatatgtctatcagcaaacttctcagcagaaaccttacagatcaggagggacttggtgatatattaaaagtgctgaaggaaaaaaaaaatgccagccaagaatgctatacacagaaaagccatcttttagaaataaatactttcccagaaaatcaaaagctgaagaagtttatcattgccagacctgtgttaaaaaaaatgcttaatggagttcttcaagctggaataaaagaatgctaataatacaaaaacatgtgttaatgctagtaacacaaaacatctataaatataaaactcattggtaaaagtacatagtcaaatttagaatactctaatattgtaatggtggtgtttaaatcacttatatctttagaagaaaggttaaaagactaaattagtaaaaataataactacaataatttgttacaggacatgcagtataataagatgtaaattgtgacaccaaaattcaaaatgtgtttgggagaatgaggtaaaagtttagagttttttaatttttattttgcaatccatgttaagttgttatcagcttaaaataacctgttaaaagtaaaagtgtcttttataagcctcatgataactacaatggaaaaataacttgttaaaattatggaaacctcgtctctactaagaatacaaaaaattagacaggcgtggtggcgggcgcctgtagtcccagctactcagaaggctgaggcaggagaatggcgtgaacccagaaggtggagcttgcagggagctgagatcgtgccactgcactccagcctgggcgacagagcaagactcagtctcaaataaataaataaataaattttataaagtgttttttataagcctcatggtaactacaaaggaagaccctattattggtacacacaacacaaaatgcaaggaatcagaatacactactagagaaaatcacttaaccacaaagaagggcagtaagagagaaataaacaaagactctacaaaacaactagaaaacagtgaacaaaatagcagtagtaagttcttacccataaataagccctgaatgtaaatggattaaattctgcaatcaaaagacagaaaaatagatttaaaaaaaagacccaatcatattctgccctcaagggacccacttcacctgtaagtacacacatagatcaaaggttaaatgttattatattatatataattatctataatataaaaacatatttatatataataatgttatacagatataaaattgaacacacaaataaatagaaagatatttcatgttcatggattcaaataatcaatactgttaaaatttccataataccccaaatgatctacagtttcagtgcaatccctaccaaaatattaatgacatcctgcatagaagtaaagaaattttaaaattaatattagaattataaaaaacctgaatagccaaagtattattgagcagaaagcacaaagctggaggcatcacactacctgacttcaaaatactctacaaagctaaattagcctaagcagcgtgatatcagcataaaaacaaacaaacagatagaccaatggaacagaatacagagcctggaaataaattcacacatttgtagccaactgagttttgtcaaaagtgccaagaacacacaatggtgaaagggcagtccatgtttattgcagcactatttttatgatagccaagatatggaatcacctcaatcatccatgcaacaacatggatgaacctggagaacctcatgttaggttaaataagccaggcacaaaaagagaaacactgtatgaccacactcatatagaatctaaaatcattgatctcatagaaataaagaagtaaatggtagagaggctagacaggttgggggagggggcttggacaaatggtcaaaggatacaaaattttagataggaggaataaattcaagagatttatttctgagcatggtgactacagttaatggcaatatattgtattattgagaaatgctaggaaagcgggtattaaatgctctcccacaaagcgataactatgtaagttgatgcatatgttaattagctagatttaactattccacaatgtagaatacttcaaaacatcattttgtatttgataaatgcatacttaattgacagaatgtcaattaagaaacaaaacaaaaccagctcatgtcctcctgcaatgatttaggaatcccagaataattaatagagccaaaatttccatcacattttccttgactgccagttccatgttggctatatcattctgtgagcaagttttcattttttaacatttagtatgtttactcagtaatcaacatatttgcttataagtagtgacacagatattcagccgcatatatttttctaaactggtatcctcttgtttctgcaccatttattgaaaaaatccatctttttttctagaagtatgagtttttgattgcttaaatagaatggaaggagaaaaggaaaataattaactttcagatttcactaggttttgggtttttgcaacataaggagtattccacttagacttctggaaaatttctatttttaatccaggtttatttgttgaccagtgcctttgaatagttttcccgttagttgtaaataaaggatttctttactctgtgtccttggttttcctctttacctgatatttagaattattattgataatttagtaataattttatcattaatatcccaatctattgcttgatttgtcatcatattgagagtttgagaagaatttatttttattaaattattttccttaaaaacaaagtgttataaaagagagggttaatagaacaaaatgaagaataaatagctattaagaggctaagtggtattaaagacagctctgtggcattttgaggttaacatatttaaatgatacattcattcctagacagatagatcagcatttaccagatggtttctgctagaatgctctcctctccaatatcatcatctcatttgtggtgtgtacagatttccagaaagtcaatggggatgtcctggggctagtgggccaggcttcttcttttcatttgtattcaaagccaatattttctttccaaatcttgcccctttcttgtttaactcaaggcttggcgtggtaggggaggttgggaatggtgagaaatagtgcctccttgaatgaaaggttggaggaaataagtttacagacttggcagtgctagttaagggcacaccccataaagaagtctcaatatggttaactagtttccagagcagtgctacaactgagccttgtgcatccctgaagtgatgagcacaagtatgataatcatcggaagagaacatatattgtataatttggaatcagccagttatttgtcagactacctttgctgtctgtaggatcagacacacatgtgcctctgcatttgggtaaatgtaaaaccacatttcctattataaagaggaaagactgctggaaacagctgctctggaaaccaagttgctcagaggaagtgagctaaacttgtgtttagctaaatggtgtgtagctaaacctacccagtgaaaaaaatatgtagaaatggactcaataactttctcaagagatgaaaatatagagtaataaataggcaagaaaatagggatagaaatggaaaaagtggagagagaataacaatgggaaagggaaagaggaaacacgcttatgtgttgtagtgactgaccaacgcagtttatgaaacaacatagctagctcaggagttagcccaggctttcaattaaaaagagatgcataagcccatatacctctttttctttccctcaaaatgaccttgagttttagtttggtagggttttggtacagctgttatttgataatatcacattgtgcttttcaattaacttagattgtttaaaaaacagataactgaaaaccatctgtttgtggttctgtgtaatttgttctcaggacagggactaggaatgaaccattttaaattctgctaatgaaacctctcattaatttaaggagttctacaaactaagtctgtggtaccaggtagaaggggtgccaagtgttgggctttctgggataagggaaaattaatttcttcctttgccatttgtggttgggtagcatcttttttttttcttcctggcagcgagtctcataatttaatatgcattaacataatcaggaatgattgcttaaaatacatgttcttgaagtttatcccaagagatttttgattcagtatctctgggaagggctccaggaattgccacagttaaacaagctccccaggtcattctgatgtagatggtctgaaggccacactgactaatgctgccttttagaattgggaggtaagtttggattttgtagatcaaatattactaccaagaataaaagaaatacacaaaacctccaaacaactcaaatgatgtaacaacaaagcaaatggctcaaagcaaacaaaacccaacaaaaggttttaaataggtccttagagatacaatgtaatttgtctcagctgcggagacttaaagaggccaactcttagttgacatggaagaatagggacaacattgccaagaaacatggttaatttcagttatggataccaaaccctgggctctggaaagcattaacaattttacccactatgctaatcttccatatatggggcatgctggataaatctattttgctaacgtctcttttacaataatgtacttaattttgttgggtatatattctaatttgtgttttctaattcaagttctaacttttaaagaggcccccacccccactgttttccctcgagcttattaaagggcataatatcactttcctcttgttaagagtaaagattggaagaatttagttatcagaaaatggtggtaggttgatgcttttggtggtggacgcagcagtctgatgaataagcatctttcttgaagaccagggttctgccactaaagatgtatgtgatttctagaaaaataattttacctcattgcatctcagttttctcctttgtaaaatagggatagtggtaagtgaatgatttctgtgatcctctctaatgctaaatagaatgagaatgtgcgaagcctttgttatctcagtaaactttaccacaattcatctgtaacgacaaaatgttattattagaaacatattaaaaagcttgcaagtggcatgaattcaggcactgtaaatgagtgtagtgcagtactgtgaaggtgaggggaaaatatgcatgtttcaatcatagggctacaagtttgcacagatctgaaaaattactgttgggtttcttcaactaggggatccagaatatcactgttattcatacctcttgccattaggtggggcagttgaagagtaggaagaccgttttcaagtgaaatgttgttttgcttgagtatgttgtttcatactcaacaacatctgaaagtaagtggtaaaatagacttccttttatatagtctaaactctcagtggccagattattagtttctttattaattctggatggtgaggaagaagggggacatgggtgataaagttaatgtaatgtaatattgcagattgtattattaatgtaaattcccatttggaactcaaaagccaaaatggatctgaagtcaacttatgcagtctactttttcagaagaacaattaaatagtatgaggtagagacaacaaaataccaggtttatggaacactagaaagtggaaaggagccatgagagttattgcggcccttctctcagtgtctattgatttcctttagcatctggggtacttaactatttccttctccttctactttcttttagaaaattctatgtcaattaatttatctgacatcttaatcgataattcattaagaaaatcttttgtgcccagcacatcatgatgaattttgatggctaatgttacctggtctctgttttgaagtgtttttattgacttataaatttaagatgttttcctagaattaaaaaaatgacatggaaaaacttcaaatcagtcttttataaggtagtgactttaaattttcatttgtcaatttccacatttaggacaaaaagtaagagatgtggagaggaagacaggaatactagggaaaaggtgagagaagaagtatttctggttacttctgttgtatattcttaaaagtaagagtccatagaaccatgatagtcaaagtactgaggaaacagcagatttggaaatttacatttcatatcaaagggattttctgtgagacaaaccaatgagatttgatagattagaaaggaaggactaataaagaaagcaactgaataaatacttgaataataaatgatatgtgtttttcacactctggtccagttatttttttttctcttttaaaaaaaattttgttagtgtttttgtgtgagatagttaaaagttcctgcaatccacagagctctatatttgattaattctggattcccagcaagtttgcatggcttttcagaggactacaaaatagggaaaagactaaattcaatatagaattgacccatgaaaatcacgggagttagtggtaccaacccctgtgcagctgaaaatctgtgtgtaatgtttgacttctcccaaaagttaactactaatagcctactgttcaccaaagtcaattaacacataatttttatgtttttgtattatataccgtattcttacaataaagtaagctagagaaaagaaaatgttattaagaaaatcataagaaagtgaaaatagatatttaccattcattaagtggaaatggatcatcataaaggccttcatcctcttcatcttcatgttgagtaggctgaggaggagaaagaagaggtcaggttgatcttgctgtctcaggggtggcagaggcagaagaaaatctgcatgtaagttggcctgtgcagttcaagcccatgttgtttaaggatcaactgtaaatcttttaacttttcaaatgacgctcattcacacaaagaaatttggaagtagacaggatttatatgcagctataattttaaatggcagccaacatcatgaacaaattctcctgacatctcattccttgatttctaagaagtcaatgcaagaggaaggtgagaatcaaatttgggcagctttgctcagctgaatattatatggtgatgattatgttaataattaaaatattgaaatatttatttagtacagtcattcaccatgtaacattttggtcagtgatggatggcctaccatggtagtttcataagattataatagagctgaaaaattcctattgtcagctctactgatatcacagccatcataaagttgtagcataacatattactcatatgtttatggtgatgcaggtgcaaacaaactcactgcatggccggtgatataaaaggatagtacatacagttatgtacagtacataatacttgatgacaagaattactgataataagtgttactgttaagtacttaatataatagattacgtccctgatttatgtatttactatactatactttttaatcattgttttagtgtgtactcctacttacaaaaaaaaaagttaaccataaaacaacttcaggaatgagtttcttgaggaggtgttccagaagaaggcattgctatcatagaagatgacagctccatgtgtgttattgcccctaaagaccttccagtgggacaagatgtggaggtagaagacagtgatgttgatgatccttatcctgtgtaggcctaggctaatgtatgggtttctgtcttagtttttaacaaaaaagtttaaaaagttaattttaaaaagctagaaaaaacttacagaataaggatataaagaaagaaaatattcttctacagttgtaaaatatgttggtgttttaagctgagcattattacaaaaagtcaaaaagcttaaagaaattaaaacgtttataaaataaacatgttacaataaactaaggttattattgaagaaagaaaatgtaaaaaataaatttagcacagcttggcctggcgcggtggctcacgcctgtaatcccagcactttgggaggccgaggcgggcggatcacgaggtcaggagatccagaccattctggctagcacggtgaaaccccgtctctactaaaaatatatatttaaaaaaattagccaggagtggtggcgggggcctgtggtcccagctgctctgaaggctgaggcaggagaatggcgtgaacccaggaggcggagcttgcagtgagccgagattgcgccactgcactccagcctgggcgacagggcgagactttgtctcaaaaaaataaataaaaaataaataaatttagcatagcttaagagtacagtgtttataaagtctacattagtagacagcaatgtcccaggcatactcaccactcactcattgactcacccagagcaacttccaatcttgtagcctccattcacggtaggtgttttctacaggtatatttttatcttttaccacatttttactgtatctttcctattttttatatgtttagatacacaaatacttaccattgtgttatgcttgcctgcagtattcagtacagtaacatggcatacaggtttatagcctaggagaaacaggctatacaatatagtctaggtgtgtgtgtgttaggctataccatctaggtttgtgtaggtatactctgtgatgttgacacaacaacgtaatcacttatgatggatatcttagaacatattttaattattaagtgacacatgactgtacttaatatgtattaggtaccaagctaagcatgcaattaactcatgcaatcctcacaataaccttatgaatttagtactatcaattagcaccatttttttccatgggaaataggatataggatattctatcacaagcataccctcaatgctagaggaaagaaagaaagagacgaagagggtgagaaagagagggaaggaaggaaggaaggaaggaaggaaggaagggaaagaaagggaaaggaaaagaaaaaagaaaaaagaaaagaaaagaatggttcattttctgtttgtatttaaataatatcacattattatttattgggaaaagctaactgagttgggagcagtgatgtaggttcgtaccaccattagttgaaatcattgcactatctgagaagaaagaccatgaaatctaggaagtttaagaagttagttttcgttagatccaaatactgttaatgttggctatcttttttggatcacaatttaagagaacagattcctttaaatgaattggttgaggaaatgaacagaatatttacaaatatttctccttaagtgatatttcattagggagaggtcttccttaatgcctgtctgaaatagcaccctcctcattctctaaatcttcacctgctttattttctctttgtagaacttaccacctgacacatttcacagtagtttgtttgtagactgtcttccctctctagcttcataggtacagggaatttctctgctctgttcactgataattttcttgtacctagaacactgcatggtacttagtagatgttcaataaatatttgaatgaatgaatgtataagtaaaataagaaaattcatgtggccaataggtaatttaaaatattctgctttgctaaaaaccaacagaagtaaaaataggtaaaagcaattagtattttcatctaccaacaatgatttaaacatattcaaaaagatatatacccaatgctcatgaaggtgaagcaaaacaaacattcttacaaaattgaaaaacactttgctggaaagtactttgtgaatatggtgtctttaaaaatgtttctatactatattttaattctattaatatattcaggaaagcaatccataattaaaaaatatcttttgctgcacaaaagtctttgcttcaacagtatttattgtagtgaaagaagttcaaaaaattctaagttccaaaggtaggggcacagttaaatgaattatgacaactctctttcatggtatattatataagcatcatgagttaggtttactaagagcttttttaatatgaaaaaaatgctaatgaaataaatttaatttgaaaaacagcataaacattggaataaatgacatcttaaaagcatacatagaaaaaatggtagaaattgtgccaaaatattaacagaaactagggcaggtaagattatgggtgattttgttttatacttctctatacttttatttttcaagtgttccagaatgaaacttttataatgaaaaaaagttttaaatattttaactgattttgtattatactagtgataatccagaagtgattatgttttatacaatagactatggctttatatgaagaaatgaatatagtctagtattgtttttattatctaggaatatacatgtaactgaagaatttatgagtaaagtttaatataagcaagtaactgggacttctggaggaaagctcactctaggggaagctctcaaatgtgttttcaatcttggattccagtcaaaaaaagacatgagttacttggatttaataaccagatatacattctcctcctttaggactagtgaaaaatgggcactgagtgagcttgggcacagactaataaaggatattcaaacacgataaacaaacagtagcgaggcccgagctacctgggcttagaaggcagcagggcccccagaaagtggtagtagcaacaattactgtggttttatcctgtggctagcccaggttccagacagaaagttcttcctggcctcttaccctagtaactctgaggactgtacccttgattcttggattgttagacacatttccacttctggctttggccctgcaaccctggtacctaaattgagcagcttgagcacacaagttcctcattctttcattatgtatgtccttgttaagagactgtgaaacatccagaatactagggcagcaagccaaagcacagcctctaataacaaggctttccattaatttgattcatttaatgaaaagctatgtgaactattgtaataggttcaagaacacaccttaattcttggactgttttttagacctttagaagtcgaaggcctctgaaattatatgagcttgggtgttgagatagaggaaacatgaaaatttattctacctgaacctctgcagttataaactagcatcgtataatttatttatttattaagtcaaggtttataagtcatttccacaaagcctagcacacagtgtctagcatatatagtagatgcttgataaatatctgtcaagtgaatttcaaatacttaaattttgttgttaatacattcatgtaatggagccatatcatctcatatgaatgattgaagaatacaaaaactccagacttgaatgcagaatatataaagaactagtacaaatcaataagaatgagacacacatcccattaggaaaatgagcaaaagacttaaacaagaagcccttcaccaaagaagaaatccaaatagtcaataagcatataaaaaggggctcaatctaatcattgaggaaaaccaaacccataattcaatacaagtacacaccacaaaaattgctacaataaaaaaagatagacaatgcctagtgttggcaagaatgtggagcaaccagaaccctcaatcacttcctgtgatagtgtgtattggtaattggcttgaaaaactctttggcagtatctactaaagctgaacaaatgcataacctatgacccagtaattctagtcctagatgtatctcaaacagaattgcatgcaacttttcataaaagactatacaagagtgtttcatggtaacaccagtattaacagacaaaagctggaaagtacccaatgcccatcaaagaaagaaccaactaataaattgtaatatattcacaagaacctaagaatacaactctaatactaatcagctgtgagaatgaatggatagcatgtagttgcaactacattttaaaagattaattaatctctcaacataaggttgccaggcacaaaagaatgcatactatatgattccatttaaacaaagtgcaaaaacaggcaaaagtattgttttggttttagaaatcaggatagttgttacccttatggagtaggagagctactgcctagaagagggcacataggggacttctgggtgctgataatatgctgctttttgatcagggtgctgcttatgtggtgtactctttataaaaatgtattgatgtttacacttacgtgcaatttttgtatacatattattcttcaataagaagttaatagggccgggtgcagtggcttatgcctgtaatcccagcactttggggggctgaggcggatggatcataaggtcaggagttccagaccagcctggccaagatggtgcaaccccgtctctactaaaaatacaaaattagccaggtgtggtggcagacacctgtaatcccagctactcaggaggctgaggcaggagaattgcttgaacctgggagacagagttctcagtgagccaagatggtgccactgcactccagcctgggcaagagactgagactctgtctcaaaaaaaaaaagaagttaatagaattttttcattcttttcaattaacttaccaaatcctggtattgagcttaccatgtgatacatataaatgcaaccccagaatatctcctgatatgatctcatgatgccatgggaagcagtaagtctttttgaaaaaaagcactgtttcacttattaaaatgccaaatacattttaccagaatttattattgaaacaaatcttagtgttatttttgacctgctgtaatgcttttgcttgtttttttattatggtaagaacatttaaattgagatctacaatcttaaaataatttaagtagacaatacagtattgtaaagtacaggcacaatattgtattgacaatctctaggacttattcgtcttacataactgaaacttcatacttatctaacagcaatccctcatttccccctcctcagaccctggcaaccactgttttactctgtttctctgagtttaactattttaatttcttatcaagtggaatcatgccatgtttttttccctgtaactagcttatttcacttagcataatgtcctctaggttcaaacgtgttgttgcatatggcaggattaacttctttttaaaggctgaatagtatacacacaaccactacattttctttatccattcacctatcaatgaacatgtagtttgatactatatcttggctattgcgaataatgcttcaaagaacatggaatgcaaatatctcttcaacatacagattttatttcctttggatatatgccccgaagtagaaattccagatcatatggtagttctatttttaattttttgaggaagcttcatacagttttccataatgactgtcctaatttacatttccaccaacagtgtacaagtgttctctttcctttacatccttactaacacttcttttcttttgtctttttgataacagctattctaatagatgtgaggtgatattgtggttttgatttgcatttccctgatgattagtgatgttgaacattttttatctacatgttagccatttgcatgtcttcttttgagaaatgtctattcaaatcctttgtcaatattttaatagggttatgtgttttcttgatactgagttgtttgggttccaaatatattttggataccaaactcttatcagatgtatggtttgcaaatactttctcctattccatgggttgccttttcactgtgttgtttccttcgcttcctggttgcattttagtttgatgtagtcccacttgtctagtttcacttttgttgtttgtgcttttgatgtcatatccaagaaattattgtcaagactaagaaaaaagagagaaaactcaaataaataaaatcacaaatgaaagagatggtacaattgatgctacagaaatcaaatggatcataagggactactataaataattatacaccaacaaattggataacccagaagaaataaattcctagaaacacacaacctccaaagattgaatcaggaagaaatagaaaaccttaatagaccaataacaaatgagattgaaatcagtaataaaaaacctcccaacaaagaaaacccagaatcaggtggcctcattggtaaaaattttttctttttttttttttttttgagacagagtcttgctctgtcacccaggctggagtgcagtggtgcaatctcggctcactgcaagctctgcctcctgggttcacactattctcctgcctcagtctccagagtagctgggactacaggcgcctgccaccacgccaggctaattttttgtatttttagtagagatggggtttcaccatgttaggcaggatggtctcgatctcctgacctcgtgatctgcccgcttcagcctcccaaagtactgggattacaggcatgagccaccacacctggccccctcattggtaaattctaccaaacatttaaagaagaattaacaccaatccttcttaaactcttcccaaaaaatgaagaagagggaacacttccaaattcattttaaggccaatgttaccttgattctaaagccagaaaaagacactcaaagaaagaaaattactgataaatatttctgataaatatagatgcaaaactcctcaacaaaacactagaaaactgaattcaacagcgtactaaaaatactaaaaggatgatatactatgatcaagtgagatttatccctggaatgcaaagatggttcagcatgctcaaatcaattaatgtactacatcacattaatggtaggattaaaaataacatgatcatcttaatagatgcatcttaataaaagtttttgaaaaaattcaacaccttttcatgacaaaaactctaaaatacattaggtatagaaagaatttacctacatataatagaggccatatttttgacaagtctacagctaactgaatactcagtgatgaaaagctgaaagctttttctataaggtcttaatcaaggcaaggacatccatttttgccatttttgttcaacacagtaatggaagtcctaatcaaaggaattaggcaagaaaaagaagcaaaggcatccaaatcagaaagaaagaagtaaaactatttctcttggcagattacatgatcttatatgtagaaaaccctctttctacaaaaatctgttgaaacaagcaaattcagtaaacttgcagaatatgaaatcaacatgttaaactcacttttgtatctgtacactaacaatgaactatctgaaaaggaaattaagaaaaaaatttatctacaataacatcaaaaaatataatatttaggaataaacataaccaagaaggtgaaagactgaaaactatacaacgttaatgaaagaaattaaagaagatgcaaataaattgaaagacgttttgtgtttatggatgggaagacttaatactgttaaaatgtccatactacccaaagattcaatacaatccttatgaaaattcaaatggtagccaagtgtggtggctcacacctgtaatcccagcactttggaagactgaggcaggcagatcattttgggaacaaaatgtaaagttgcttctaaaagagatttatgaagttttttgtttactctatgtttaattatttgctgagtacacttatcacattgagatgggaatttgaacaagatctttgtacttgattagagggaataaaaacagcacacttatcaaataatcagtgtgttatcccataattcagcttgtggcttgctgaaagttgactcttgtgtaaaagattagttactttttattgttttaaggctagaaacataggttctatttttgtcaatgctactacatcccacaaagtgtctatatgagccatttccaaatttccatttatgataaggggctgtgatgcatgagtatacccacgtttttactgacatgtgtagagacaaactcatgagtttgcctagttaccttttattctgtattcacagatttccaaaccttcggggttaggccatactttcagggaagtgggtgagctttattattgaggccaagtcttctatctctgtttagatgcaaacctagtacttagggaccttgtcatatctattttctgcaaagtactttctgtacttgtcaagatcaataactggttttataatgacagaggacacagaatttagccttcagaacagaaatggctatttaccatgcgaaagtattttttttttctgacaccatcagaccagtgagcatagatttctctctgagagacactttttaaacacaaaaattacctatttatcttgttgcatagcagctctgtcaactaaacagtgcatttaataataatgataatacataaaaagtctagtatttcatggtttacaagatattttccacattaattgtcccattggaccccccaaaattctataaagtggtcatataatgtattatgccattttgtatggggtaactgatgaggtaacagaccagagactgagcctagtttgcccagctaagaactatcaaagccagtcttcccaactcagtccatgatctcttactattttacttcagccctgtaagattcatggttgtatttccttccatatagaactatggaataataattactaatttagaatattatatagtccattttgtacaaattgtctaatttgtatagtactatcctagtactagtatatataattctatatactagtcatatatactagtatatagaattatatatactatatgtatgtatatatacactaatatatataattatatacacatatgtattacatatatgtatatattatatatactagtatatatactatatataacatatgtatatataggattatatataaattatatactagtatatataatatgtacttgttatataattatatctacatatatacacatatatgtagtactatatctacatatactatatatctgtatatatatagtactagtatatataattatatatacatatatgtacacacatataggatgctatgagaatgcataggaagggaacatagtcctagagtatcataaactttcactctgtgtccaaagtctttcattaaatgataccagaacataggatctactgaaattctaaatggccagttggaagaggaaggtcatgtttggggaacttggttaaaaattacctttagtggaaaagaaagataataactcagtaaaagtagctagtaggctggagcagagtgtctatgtttgctatggtttgagtgtatctcccaaaattcctgtattagaaacttaatccccaatgtagcagtgctgatagagtggaacttttaagaggtaattaggtcataagagttcttccatcatgaatagattaatgctgttatcatgagagtgggttagctattgcaagagtggctttggcataaaagcaagctctctctatttcatgtgctctcaccgtatgatgctttctgccgtgcctttgtcaggtgctgataccatgctcttggccttcacagcctccagaaccataagctaaataaacttcttttctttgtaagttactcaacctatagtattctgttatagcaacagaaagtggactaagacagtggtttaacgtctggatttcaaaatgaaaacctgaaaaagaaagaatgggaagaggtcttacaaaaatatcaaattaggctcaattttattgaccacagtttcttaaacatagatatctctcatatattatcaaacacttatggtgaaacactacatttttgttcataggagttctccatagcagaattcctccatctccctttactttgccctgaaaaaatcagcaccccaggaattctttatctttcaaagacggcaacatataaataagcatttgagtttcccatacaggaattttttgcaagtctggcttagaaaatggccatgttctattcaaaactctttgaatttctggttaaataaaaatgccaactatgcctttttcattaaataagtctatctttcattatctaaatgtatgtcctactataagttcccaatggcagctatgtccttgtgcttagggattgcaagatgaaggttaactattaacgacagtgtttctgaacctgaagttattagaaaatctttagggactccttggactcttggaaattatgtacaaaattataatgactcatttgtacagtcatcccttggaatctgtaggggattgattccagagccaaataccaagactgcagatacaaaacccagtggatgcttaagttccttacataaaatggtatagtgttaatatttaacctatattcttccatacactttatctctagaatactgctaataactaataatatgtaaattctatgtaaatagttgttataaacaatgatttttattattatttttgtggttgtattgttacttttgtggaatatttttaatccccagttggttaaattgtggatgaagaacctactaatatagagggtcaactgtacattctcttgggaagtatattcagagctttcattagagacttaaaaggaacctatgttactcccctgccccacccccaaaaaagttaggaactactgcttggtgggggtaataaactatccttggaacatcagattctttagatacatcatagagaattggcatctaaagaaatattctgtggtaaccagcttccaagatggcctccagtgatctgcactttctggtattcagatttttgggtcatctcctttcaaattgtatcagggttgatctctgtggccaagaaaattcaggaggagttatgatgtgccactttggaggttaggttataaaaactgtggcttctgtcttggttacagtttctctttctccaatcactcactctggaggcagctagctgtcaactcacaaagacactcaagcagcctatggaagaaggccacatggtaaaatatggaggcctccagccaacagtcagcaaggaactgagacaagtcaacaaccatgtgagtgactcgagaagtgcttctctagctccagttgagacttgcagtagcagcagcctcagctggcggcttgactgcaatctcttgagagaccctaagctctcctgaattcttgatccttagaaactgtgtgaggtaagagatatttgttgctttaagatgctacatttggggataattcattacacagaaatagatatctcattcacattatcttgactggtcatgattaaaagaaaagtgaatgtaagaaaataaagtgtttttaatgctgaccttccctgttaatcctagaaaattagagtttgaaataataatgtcatagtcactattcctttaatcttgttggtaaataatgaatgcagcgtggcccattcaccgccagcacttggtcaccattgtgatctacacagcaagaagcagcctaacgacctgtctgttgaaacaaacaagttttcttttaagtgatttctttgtttccatttataaggcaccaactttcaaaggtgttctgggaaacctttcttgtatttcttctaagcaaaatcaattcaacagagagttcacgctttgcctgtgatcaatggggaagtaccagtgtagctttcttttttttcctatagggctgctcatagtcctccgatagactttacagctgttagttttgctgcagtagtgacttgctaaaatggtggctcatttgaatggtgcttgtattaatttacactcccaccaacagggtacaagggttccctcttctccatatcctccccaatatttattatctttttttcttcttcataatagccattcaacaggtatgaggtgatattgtggttttgatttgcattttcctatgattagtgatgttgaccactttttcatatatctgttggccatttgtatgtcttttaagaaatgtctattccgatcctttacctttttaaaaaatgagttatttattttcttgctattgagttctgtattttgaatattaacttcatatcaggtgcgaatattcatatcggatgcaaatattttttgttattgtataggctgtttcttcatactgttggttattttcttgtggtgcagatgtaagcttttagttcgatgcattcccatttatgtacatttgcttttgtttcttaatacacctttgtattgagtagatcagatcctttatgaaagcaagaagggatcaatgattacctgatggagaagaagaaaattgtgaggaaaagggtcaatgaggacattctttgctgttttgcaattttccaatgagctggtcttgatattatgtttgcgtaaatagcttggtctgatcttggacactaaattccaatccagcaggttctatctggaaggagactatatgatggtggagacacaagtctgaaggtgaaatattgcacgatgtagaaatagatcaaccatgcacatttatagaacatctactaccaggtgctaggttctgtgctgagcaataaacataattcctctgtaatttttgtttgtttgttttgtttttgagatggagtctcactttgttgcccaggctggagtgcagtggcgcgagcttggctcactgcaacctccgcctctcaggctcaagcgattctcatgtctcagcctcctgagcagctgggactataggcgcacgccaccacacctggctaattttttgtattttagtggagacggggtttcaccgtgttgcacagggtgggcttgaactactgagctcaggtgacccgcctgcctcagcttcccaaagtgctgagattacaggcgtgcgccaccacacccagactcctcagtaatttataacctagttgaaagatttggacatatgtatcacaagatacctatgaacaaaggcaagggcatatcttatttataagatgtttagatagatttcaaaggaagtttttcagccaaaaattccatcatgtttccatttttgaaactaaataccaacatatctcaaattcagatctcaattacttctactggcaaaatgtaaagaccattccctcattcatttgttatttctccaagtatcctgagtactggatatctgaaaggctctctgctaggtactttgtagggtaggaaaacctcaaaggatgtgtggaaatgaaaaaagtttccaaatacttcttcaaattttgtgaaacttatcaactgaaacaaggttgatttgggtcaaacaaggtttgtgaagtaaaagcaaagcaattttaaataggctaaaaccccatgggttgcaatgaaagcaatgttaagatgactcttaagtaacttagaactgttgaggactttggtaattaaaatctcttcctcatagctcccccagcaatcaggaaacaaggatagtttggattaaggtctcataaataaacatacagcttgtcagtccttggagatggagaagtcattcttgagtgtgccacatggagggctcagagataagtgatgaccctcttgtcactctggcagaaaatatattaacttctttaaaccaagaattatagtgatttcagtggtacaattacaaggagtgacttctgggacttgcataaatcaagcttatttaaatagtgtttcagaaaagaacatatgctactattaaagagttggaaaaaaacaactgcaatcccataagataaagttaggtgagaatattcatatttgtttcagatacaagtccattatttatgtcaaataattaaatacctctttagatatccattccaggggaggctcttgagcctttcacctctctcatgtccaaacttactagttatttcaatactgaaataattccagttgttcatgaattatttgatgagatttagagtgatctatattagttaattcatttatcagatttgttgaatacctgttatgtgcactggatggcaattggtgccatgttgtatatacattggacaaaggcaaaattctgtcttgggatgcttaagtatagtgaagaagaatgacaagtgcaaaaatatctaattccaaagctgagagaggagagaaagattatttaagttggtatggtcagataagtaaaacagtattttaactaagctttgagaaatagatagaattctacttggaacattgaggaggactccatggaaaagtaataaaatgaatgaagaccagagccaggctggaaaaaaatctttttaatggaatagcagtgagcaatgcagaaaagctagagatcatcttactgctgtgcactctaaatattccccatggctgctaccttgtccaattccctcacagtcctgcctgctacagaaagcgtagcagttttctctttatcgatgatgagcaatagaaagaaatgcttcactctgcctaggcaacaggcacatttaatatgggatttctgttgacagtgccttaagccatggagctagctaatcagcaccttactcattgtatgacaggaaagagaagagatctgggaatgagcagatcattcagcattcctgcaaacatggagaaacagagccagacagctagctctcccctcccagtttctatgagttccaatgtgaccaaaagccttatcttggcctttgcacctggaggtcaccgctgccgctgggaggatgagtggaggaacttgggatgtacatgatagggtcagccagccagcaaatgagtgtttgcagagtgactagggaggagcaaaggagagctttcactgctgtaatagtccagaagttgctgctgaatcaagcgaaaagaataagcaaagtgtttcagaagtcagcctgcttcacatcttgttgttcatttattccctctattctgaccactgagcccaccaagctctccttcttgatataacttttatcatatttaatattagggcaagactagtttgggatcttatgtgtctaatttatataaatgtagcaaatagtctttttgatggtaagataaactagtgaattatctctaacataatcaataaattttcttattgctgggtgtttctcaaccatggtttcgcattaaaatcatctagcgagcttaaccgccccctccccaaaacacacacacatacacacacacacacacacacacacacacacacacacacacacacacaattcccaagctgctcctaggtcatttataccagaactcaggttaggactcaggcaatggcgttctttaaagctctgcaggtgattctaatgtgccgctggagttgacagccactgttccaaatgtcttgaagatgaataataaaatccagattggtagtgagtaaaaatatatgtgtgtctaatgtgtaagtctcaaattattaacatttctcaacaatgtatttccattttaaaaatcatattttaaggaatgaccttcaaaattttgttatagaatattattttagtgatgtttctctgttagtaatgtgaagcatgttgcacataaactgtctggagaatgtggcattatttgcaaacatgtcagagaatgcagcagattttacaaaggtttatgaaaacaatatgcttcattatttgttcacataaaaagtaacaaaattagcttcctgttaaacagaaagcccatagagtagaagagaaaagggtctggttccttattcactcccagctaccgtgagggtgtcttattgcccaaatccaggacatctttgactttttcttctcttgactgtctaatctaatgtcatgtaactataataattcaaaataaaagtagttaaaatttaaaaatatatttaaagactatcaagatctgttgattctacctctgcaaattttctttcacaccttcatcatttgtccatttttgtggccacaatcctaaatcaaactccctgttacctcctgccttggtaattgtcatatgctccccatgcaaattttttctcagacattgcctctggccaaagatctgatggcatcatgtttttcactcatcttcagtggttctctgctacccacagtaattttacaaaacattagctgggcattcaggttctccgtcatctggccccaaccttattcccaagacttctcccctttgtgtataatactatgaaatgatctaactgtttggtagtcctggacatggctatgttctttctgctgtcagaaccctggctcatgctggtgtttctgccaatgcctaaatcccacccagtatagagggctcagatttcatctgcttcacaaagccctgaactacagagttaaaagtaatgttttttctactgtaatcacatcgcagcacattatctgaaccattttaaaaatatttccccagagtcacttaatctttctgagcctctgttcttttattcataaaatgagaacaataatacctacctaaaagactgcttgtgaagagtatgattatgtgtgtacaaagcatagtgcgcagtagacaattttcaaatctttctttcttctctctcctttccttccttctttccttccttcttccctccctccctccctctctccctcccatccgtccttccttccatccttccttctatgtattgtccattataactttgtaatttccttttgggcaggatcctgtgattggtaaatttttgttttccatgcagtttctaggctaatgctttgcatgtgtaggtactcaatgtaaaggtacatgttttaagtgaaaggacccaaaattcatgacttgctgtacaaatgatgatcagggtttaggagaggagatatagaccagaaatctagttgttgttttgagttattattattacttaaattatcctatatttttaggttaaaaactcattgagcaaatcattatcttgatgagaaatcaagagtcaggttaagtaaatttattttggttagatgtcttctaagcatcagttaaggattcaaaccaaggcctctcccatgtgaaaacatatattgtttcagcttatcaggattggttagattatctccaagattatgtctatttaaatggcagttattgcagataatatcaatgtcctaggtccacaggaaggcaagaagtagacttagcagtaagttgctgagcaggaattctgaaaagggtgaccaggatcaggtgaagcacgtccagagagtaaagggggtaagcaagctcttgttattagcccatatgtacttaccctgggctcaccgaagagtcctaaagcaaagcttgctgtggctgcaacctaaggattggaacaagtctataatccttcaagagccaagtgtggatttctcccttctactctctgcctcagtatattttccatgttttcttacttgttctgttgctggaagtttccttctttccaagagatactcagttttaaagaagccacaggtgtctttgccaaagcttgctctctgcatcctgttacactcttagagaatcccctgatgacgtcattcaagacagcctactttcgtaattgctgtggaaggggcagaaggtcctgccactacattgctttctgtcacccacccccaagatggaagaacaggttgtctctgaggaattttgatttggggcacattgattccagtctctctttactggagcttgaaataggggggccaattttcctataaaaaagagtatgaaactgatatccaaagagacacacgatgagaatctatgaactccacgaaaaaagagctgataattataattgtcttcattcttggtagctttctagatgggttctaatcccgcaaggggcttagttgccttcctagctttggcgtctataaaatagtcctataaccttttaataaaggtttaataaaggcctaagcccacatgagtgagttttatacattcaaacaatctcctaagtgtgagagttaattaatttttaaactattctcgaaattcagccttaatttgcttttgcttaagctgggtcactaatctgtgctgaggacccattatccattctttgttaggttctacagtttacctctagggtacatttcatagtccttaatgtctcttctgtataactgattatttatggaatttcatgatgcgttaaatactttggctgagtagcaaacacatttcatctaatctttcaattccacaacagtactactgggcaacatttttattcttggtggatacaatttctttctttttttttttttctccttttattccttcctccttttctctctctttctttcttttaaatgtttgtgatatcaggatataaagagccaggtagaagagcacagaattagaaaccagaaaactgagtcctagtcatctcatttctcctggcttcacttttacccttaagtgaggagactatacccgagttccacctagcttgcaaattctataattcaattattccatcaccattctgaaatataccatgtaattatagaaattactagaaaattttttgaaatacacatttcccaaatttatttgaccatggaatactttttaaataattatatattggtagaacatatacgatagttcatggatataatatgcactttgattaaagaatacaaaaaaatggtctgcaacaattaattgcttcaagaaatgattaaaaaattcattcatattctaacttaattacaggaccaaaacaataatacaaattaaatagattaagtcattttatttttattaagtacataaaaaagacaaaaatggatgaaatgatgacaagttgcataacatggagcagtgatgattaagaggcagtgtataccagtaaaattagttggtaaatactactaatagatacttagcattgacattaaaattaatatttatatgaagctttgacatttaattctacttcatgcattcatgatacacccaatcacttgttttgcaattatttcaatgtggattcttgcataataacaattatagatgtgtgtttaaatatattaaatatattttataagaaacaatgttgttggtaatttttcttcttagactactcagtatcttatagtttgagaaaaacagacctatctgaacctagatactatatatgtttccaacgagtagcctatttttcccttccttttcctctattgctcacgtgcttacatgcattattattgggttatatattgagttattctctcgttggcttttgtattctgtggcattacatatctttgatagcagtaagtttgacactcaaattttgtagaagtcaatggcagtggtccttttataggtttaaacttacctgactgcattatatcccttgagaatagttttaagggattttcattgaaactactgtatatgattaacatataatgcctcctattatgaacttggaatatgcacattaaaagagttataagttacagttaatcatttgttcattgctttctttatagatcttgagaaaaacctgatgagtgtagcattgccattttgtaactaatccttcatgtaatgaacctaagcttccattattgtgaatgaattagtctatttaggaaccgctttggcttagcggtgaactgtatttcctacttaaggagccaaacattaggaagcaactgtagcagtgtacagcagcaacttcatcattttggaattttaaaattctaccttcagggatcttagaaccatcctagcttccgagatctcactgtgagtactggagtgagcagagttgtaccaggatggagagattgctaatttccaaaaatgggattactgagttaaaatataatcctgctttcagctaaaaacaaaaaaaccccaaaaaaccaaacagccctttatgacacaatttcactatcctgaacgcaattttatttcattgattataaacaatgtgaatgtagataccaatattgcaattatgactaataattggaggcaattatttatagtagttatatatcagtatatatatttaccatttatactgatattaatgactgtggctttttaatagtggccacagaagtcacatagcatggtttagtgaagtttggttcacatttgtaggcacttcagaaatatcatctttgagaacacacacacacttaagttcagtgagaacgtatataattcaaagaataacataagcaatgatttaaacttctatgtatgtttcagtctgcctcagtgttagcagcaggaaaattattctttacaataatgaaagacatttccagattcaaaaaaaagggaaaaataaaaaccatggaaataatatatttggaattacagggctactagcaatctaagtgttgtggaaaatcttggtaaatagttcagtgaaattatatagatagaagattgattgaataaacctactccaaagcattgatatgccacagcattcttcctttggctgtgttctgcccaatattttaacaaggggttgcatcaaaacagagtgatgctgatcaactcctgaaaaatatttaaagttaaaagaaatgctaagcaaaaagaacaaagctagaggcatcatgctacccaacttcaaactacatgctacaggaatacagtaaccaaaacagcatgttactggtacaagaacaaacacatagaccagagaaaaagaatagagaacccagaaacaagactgcatacccacaaccatctgttctttgacaaacctgataaaaacaagcaatggggaaatcattccctattcaataaatggtgctgggacaacgggctagccatatgcagaaaactgaaactggaccccttccttacaccatatacaaaaataaactcaaggtagattaaagaattcaatataaaaaccaaaactctaaaaatcctggaagaaaatctgggcaataccattcaggacataggcacaggcaaagatttcatgacaaaaatgacaaaagcaattgcaaaaaaaagcaaaaattgacaaatgggatctaattaaactaaagagcttctgcacaggaaaagaaaatattaacagagtaaacagcctacagaatggcagaaaattgttgcaatctatccagctgacaaaggtctaatatacagcatttataaggaacttaaataaatttacaagaaaaatacaaccccattaaaaagtgggcaaaatacatgaacagacacttctcaaaagaagacattcatgtggccaacaaacatatgaaaaaaaaaatcactgatctttagagaaacccaaatcaaaaccacaatgagataccatctcacaccagtcagaatggctgtgattaagaagtcaaaaaacaacagatgctgcttatggagaaaaacgaatgcttttactctgttggtgaaagtgtaaattagttcaactattgtggaagacagtgtggcaattccttaaagacctagaggcagaaatatcatttaacccagaagtcccattactgggtatatacccaaaggaatataaatcattctgtcataaagacacatgcacgtgtatgttcattgcagcactgttcacaatagcaaagacatctaaatgcctatcaatgacagatttggtaaagaaaatgtggtacatatacaccatggaattatgcagccataaataaagaatgagatcctgtcttttgtgggaacatagatagggctggaggccactatccttagcaaattaatgtaggaacagaaaaccaaataccacatgttctcacttataagtgatgatcagaacgcatggacacattgggagtggggaaacaatacacactggggcctttcagagggtaggagggtgagaggagggagaggatcaagagaatagccaatggatgctgggcttaatacctgggtaatgggatgatctatgcagcaaaccaccatggcacaatttacctatgtaacaaacctgcacatcccgcacatgtacccatgaacttaaagttgtaaagtaagaagaaaagaacttgtctagatgcaagttaatctgaaaaaaatttatattaactgagcacactcccagccccaataacataggtgtttttgtttagcaaggaataagaaaagaatggatattgggtggatacctaatagtagtctttgtcagactgaatcgagcagatataataaaaaaggaatgtgtgacaatgctatggtttaaaaataacatgatacccagcactttggtaggccaaggagggtggatcacttgaggtcaggagttcgagactagcctggccaatatagtggaaccttgactccactaaaaatacaaaaattagctgggcatggtggcagacacctgtaatcccagctacttgggaggctgaggcagaaattacttgtacctggaaggaagaggttgcagtgagctgagatcatgccagtgcactccagcctggacaacagagcaagacttcatctcaaaaattaaaaaaaaaaaagatagtccagaaataacaagacacaatctaacaggaaagaaaggttaatttcttatttaggctttaagaaaaaaattttaaaaagcagtagcgcaagtacagaaagacctcattctcataaaaatggtagttaattgcaagtactgtatcaaatatgtgataagtctatctaaaaatcttctaaattgaatctttcttgagggaaagaaaatcaacattaattgaaatattattgctcagacaagaaaggtagcagtagttcattgtgctcaaacaattgtcagaccacctatggaatatcctgtacaatgaaaaattacaagtttcccagagtgtgttcttcagagcagtagctcttagaacattaatgattattatgagaagggaaggtctattgtcaaagaagcttggaaaggatgagttgttaagcaaaaggtgtcttttgagcagtacttttcatggtctttaatataccaatatgcattgcagctgtccaagacaggaggccattaaggaagcctgaagagaaatgtcccaccttagtgtcctgaaaggatatgcactcctctatagctatttactttttactttcatcccctgacctttcttccagcactatggtcctctcttcatcacttctctctattttgattattttcttctccagtggctcctaacttctttctacaaatgcatttgctctgtctgataaaaatcattttaactttgcttctccatccagctaccttctttttttacccttcctgttactgcttctggtattcgatggtttttccttttcccttcccccatttttgaacgatagactactttttttcatagctcatcttgcacgttagtcttccatgagatatgcctgtaggcatgcacaactagagatgttaagtagaggcagaaagaaaagaaagacatctggcaattagatctgactttatccattctggctgttataacaaaatagcatacactcagtagcttacgaacaatagaaatttatctcccaaagttatggaggctgggaagtccaagatcaaggtgccagaagatttgatgtctggtgagggtgtgctttctggttcatagttggcaccttatagttgtgtctacatggttaaaggggcgaagggtctctcttggacctcttttatagggccactaatgacatctcaagtgccccatctcaaaatattatcacattagtgattaggtcttagaatatacattttgaagggacacaaacatttagagcattccaaggtcttatttgtttttcagtggttaagagtttcgtcagggaggaggagtagaattatgtgagcttacttcagagcagagtttactaatcttctatgtgtgtgtatggagtgggtgtaaatcctgaatcctttcagtaagaagggtacacctatgaatgccttctcagtacacttggccctctgtacccatgggttctgcatcctgggatttaactaaccatggatcaaaaacttaagagaaaagtttgcactggacatttacggatgtttttttcttgtcattatttcctaagcaatacattataacaattacttacataacatttacgttatactaggcattacaacaaatctagagatgatttaaaatatatgagaggatgtgaatgggttataggcaaacactatgccatttcctatcaggggcttgagcatccatggattttggcgtctgccagaggtcctggaagtaatctcccacgaatactgtgggacaactgtataatagttttttgttgtttttagtttgtttttggagacagggtctgctatatcacccaggctggactgtagtggtgtgattgtagctcagtgcagccttaaactcgcagtctcaagcgatcctcctgtctcagcctccctagtagttaggaccacatgtgtgggccaccacctggatcatttaaaattttgtttttgtggagatggggtctctacaaaagagatgtcacttaggtaggtctcaaactcctggcctcaagtgatcctcctgccttggcctcctaaagtgctgggattacaggcaggaggtaccacactcagcctgtataatgtttataagcacaaaataaaattgtagaattaaaaatgaaaccagttgtattaaaacaaattatacaaatattaaaataaaaatttggtatagttatatatgtgcatctttattaatgtattaaatcataagatccagcagatcacatatctaacatacttaattttgaagtgcttgcaagaagtctaatgagataagaaggtatctatgatttttactggcaacaaagtcacaaactacagtggtttggtaactatattcataattgaagaaaatggtatttttcagttacaagttagtaaaaatacagatgtaaacttgtcatacaagtttaccaatctcctgaattctttgtggactccaggttaaaaactactaaatggtagagtatatagttacaaggagtcagatttaagctcattttaagtatatgtattatgtgtatgtaaagccttaataattaagatgtcctagaatgaaaggattttctcacaaagtagtgatctacctgttaatggaaacgtccagttagcatctagaaaaatattgaggatgttgtagtataacactaattaatattagctagcatctactgagtgcttgctgtgttttatgcactgggttaggagcaatttttgcattgtgtcttttttttcatgatagttacgtcaggttatctctgtgtcatagataatacaatttaggttttgatatttgttagaagttgactatagcctgcaatcccagctactcaggaggctgaggcaggagaatcacttgaacccaggaggcagagtttggaatgagccaagatcacaccactgcactccagtctggacaacagaacgagaccccgtctaaaaaaaattaataataaataaataaataagttgacggcaataagtggcagagtatgaactctaacccatatctaggtgtctccaaagcctataattggagaatattttgataataatgtaggagagagattggtgagagaattagagatcaccttgttcatcctctttatttgatagatatgaggacactgagaactcaaagaagttaggtgacttactccaggttacacagtttatagcagagccagaaattggactttgatgcctttttatgtggaaacatgagcttttattatttagctcttcatctggtggaagtggaacacaacctgaagagagaggcaatggactacactatggtttggaacagagtgtatagtaatttcctatttcatttagacaacagggatatgcctgaaagtgcctttacccatgtcatgcatttattcacaatgaacacaaaatttacttgagtaattttttttttctcgaggtatagtctcgctctattgcccaggctggagtgcagtggtgcgatctcggctcactgcaacctccgcctcctgggttcaagcgattctcctgcctcagcctccctacttgagtaatattttaaatgtaaccatagtgaactgtccaatactaaaatttgtgcctttgataatatttatattatgaataaaaatatgctcttttaaccatgtcctcatctattttaccagaaagtatcttgtgtattgtcaatacaaagtatctaatgcatgaatgactgagtatgattgtctggttttctttaatcactacttacaccaaataattgggtatttacaatatactgattctattattttttactgaaatataattatagttaaatttaccattcgttaacaatgagggaagaagttgtctagattagttcaaaaaccaacatgtaaattctttctggaatacggtaatacataaatgaatatgcaataaaagtgtgaaaacaatttttaaataaaaacagttaaattaatttctaaaatatacagggattacactaacaaattttcctgagtatgaaatttaggaagcatgcttttctaaaatgaatgctttttaacattatttataaacaaatgttgtttctaatattttatatagcctacatgcaataggtgctcaataaatactcattaacttagttcaagatgttgacagaacacatggtttttgttttcctttacttttcctaatacccattaaaatagtagaaaaactaaatctgtataatgcacaacaataaagagaatggggaaaaggccatcagtggtaagagattttatcgaatttctggaagatgaaatatgagtgagtggtgttgattactgaagcaaaacaaagtcaattattgcagagaatatttgtagagggagctacacccaagaagaagccctaataacatggcagaagctaacaaggctccagtttcagataagccaatgctgatggacattgaaatgagaaacatagatgtaatcagcattttgatcaagagcatgtgcactagtttttgctgcccaatgagccactttaaatcataatggcttaaaacaaccatttatttagtttactattctgcctagtcagccattttggctgggcttatatgggcatattcctgtgtctttgctcaaccaatcagttgatcagctctgcttctgcaggttggttgggtgtcagttagcaagataggggccactaggccttgcaaatctcatcagactagtttgggattgtcacttagtagaggagcaggattataagagaaataatataaacgcaagatctcttaaagtctaggtttagaattggcacacattaacttcattcttgcattgcttgactaggttataagaccagtccagattcaaaggatatcgcaacagactgttatttgttgatgagaagaactacaaagtcacattgcaaaagggtggatacagggaaggtataaatcttgagcatttgtgggtctaacacaatgtagagggcccagctttatccttctctacttaccacatctgttctcagccccatactagaatacgtggcatgaagccaggtatttaccatcacttcaacagaagcgaaaacaaagcaaaacaaagtttatttaatgaaaacattaaatgaaagaaaatagataaaatatatttaggaaaatctcttggaaagagtatattaatagattagagagtgtgaatgaggttttggaaaaccttgagggtgtaaattgatgctagaaacatccttctctgagtggcctactaattctgacataggaatcagagaaaaggaaatgtaatcttaactatttcactttgcagaaaataatctttacatagtcataaaaatgaaaaccctgtttatagttttcaactttagaattgctccatagacaagtcatataagtcttaactgtgtatcagtgtaaatgttttcaaacttaacaatattaaaacaccaacctgggacccataggcacagacatatcttttacatctttgaaatttaaagctcaatgtgatggtctgtgtcttgactctatttagccaaaccactgtgtcatcttttactaatactctttccccatgatagtagccccaagacaagtaagctggtctagaggctcagtggatgttcagtgacagtgcaagtcatcaccctttactttttgcagataccacaaagctgtttttaagagtctcttgccatcctgcctatgactttgtgcagtggaatcagttgagttcatgggaaagcaaataaaaggatggtctctgtttatagacatagccctgtcttagaaatctaatctctcttatcactctcatctacaaagactgtcaaggaaatgtgtcctctcctgcccatggagacagattgggcatctcacatgaaaaaatatgtcctttgaacttgcctgagaaattccagtaacttttttctcaccaggatacttttctactgtaagcttgccaatatttggtaatctctagaataggaacccatctcaatcagcagtgcacaccatcctgttttgtgcagtctaagtttagagctgtctaagtccatttgagctgctacaacaaaatgccatagactaggtagttataagtatcagaaatttatttctcacagttctggaagctgggaaggccaaggtcaaagcaccagcaaatttggtgtctgatgagggcccactttctggcttatagatggtgcattctacctgtgtcctcacatggtggaaggagacaagtcaggtctctggggcctcttttataagggcactaatttcattcatgaaggttcctccttcatgatataatcaccccccaggccctaccttctaatatcatcacattggtgattaggtttcagcagatgagttttgggggaatacattcaggctgcagcaaggtcaaaaagaatattgcatcattttgctttagagacctttctgttctagctacattttgattatctatatgacacaataaaaaagaaagtcaggaaacctaagatcttatacttcaatagagtttttataggacaacattgattaatggctacagttaatacaaaaactctaacagcagcaatcaaatatttccattcatcacacttgaaacttggcctcaggtctatggtattttgaaattttttgttgttgttttgagagtgacatgagtgcaggcccagcttcatggatatacaaactatacattcacatgggttccacacctagatgggctcttacatcatgtagctggtcctacctgggagagagctaaaaattaagttgcagtcatcaaattactgatcagatactgaaattaaacctgaaagatgttgagaacccagagaaattctcaatcatgttaataatactttcatgcatttgacatttcttttttcctgcctcttctctctacctgtagaacttttcaagttccattattataccattgttggccctttgtttcctcctccaaagacttaaagaagaagttatgattaagcatatgaaatatgcataccaggttttctataaagattcctcggcatctctgccaagctgtcatatgagcacttgcatgttgttatataaaaacacatattttaaataaattttagtgctgttctaagcaaaaagcacatattttaaaaatctggagttttctgtttcaatttgagagaactacattttgcttaattactatttaaatcactgtaacacaatattgatgacaaaatttgagtttgctttttaataaactgtcaatcaaagaaataacatagaactttgtttttctcctctgttaaggcatggcttaactgtaatttacttgaaaacattatactgtttgacaggaaaacagaaccaccttgaattattctaacccattcagatttaagaaaatgcatcgtagcaaattaactgctatttggttttgatcattctgtctgtatcatagaaatatggttcactagtgaatcaatgagagataaaaggtgatcatggtctgtgagataaatgctgcccctctgagttgcttccaacgtagccagcttcagtgtatcagttagagtagttaatactaactgttgtaacagataaatacccaaatcccagttgctcaaacaattgaagtttatctctcattcatgctaagtcagttgatgtttctggttcaccagctgccttccacctggtcacccagacacctgggtttcttcctatgcacctgtggcttcattttcctctcaaacttcagacttctctcccatcagtatgtgaatagggaacccagagatgtttcctatgagcaggcccagaagtggcttatgttgcttccatttaccttacatctacatgtctatacaaaagaaatgtggtctagctatgggcccagggaagaaggaatgaatttcattgactctctgccactcgctgcttaaggtcagatgatactgcactctatccaaatcaatttctttttgtaatccttaaaacaaatgtgttgcatccatattatatttataacatatgtctgtttcttttggacagtattattctgtagacttcttgactgatacatcccaagatcatctttactgacttagggttacagttttggataagttatcccaatctcaggagtttaatatgccttattgcagatcttttccaacttctaggtaagaagtaaactcattcctaatcttactacttggacatagtctctccctgctaccatgtcctcacaggacctcttccttggttcagtattgcaactatctcccagttttcctctttcatctctggcttctccttctttatctcccttttaacttctatttgaccattaagtgttggcaatgcctcaggcgtggtcctcctttttattgccttacactatacttcccatgcctctgatttcaatgatcacttatatactaaggactcgccaatttgtatattcagcccatatttgtcctctggaactcagacctgtatatcctaccgctttttcaatatcttccattgagtgtttcagaggcattttagatccaaaatatccaaaactgaaattctgttttcccctcacagcctgcttactgcgacctgatttttctcttgtggcccttaaaactatgaatatcaacagtcatccaattcttcaccttcatcttcctccctcagttgctgtaagtaccctatcactaaggcctgtcgatttcaccttccagttatgcgctgcatctatccctctctcttcatctttcccggggccggcctgtctgtgctggcattacctgtttcctgaaccacagtgatagctgccttgatccatttcctggcatctgctcttgcccctcatccaatctgttctccatattgcagtcagtcacctgtttgaaacagaagtccaaccttatcactcaccacacacccttgccttaaaaccagttagcggtttcccattgttcttaagactattaacgtcatttttgtgtgattgtccaggggctcaataatctgaatcacaccttgtctccagcctcctttctgccttatcctgaagtatcccctgcctgtttcactccctcagcttcttgtacaccgactttccacccagtgcctcagggcactttctcatgctgttctctctgccaggaacacatgcttctgcttttctctcccctttacctagtgaatccctcctcatccttcccatctttgtaaattcacttcagtttagaagacttctctggactgttatattgtcagaactatcttctatatatgctgcagaagtatacatacgctgcatacttctttcactgtacttatcagatatgagtaaatgtataatttaatgtaaatgtgattaaattgttagtctcttttattcactgaataatgtctatttgctcatcactgcatcagtagtacctagaacaatgtctcacacacaattgaatccaataagcatctttgttctcggcagctcctcgttttttaatcttaagccctaccctaccacctagcacagagagagtctaaataagtatttatttagttgaagtggctgttaatggctagtgtttaaatatattcatttgaaagacatatttcacaaaattgccttgttggccagcccagtttgactcccaataaaaaatacaagtgtgccattttgtttcagacagacacataaggttgctatttagaaggagggtttttattgatatattaagactgccttgaacatatcaagttaatttattcccatttcattttttagccatctgtttgtttctaaaggaacaaagatttggtagaagtggtaataaatactcagataaaaaatctatgtaataaaatttctatgtaatcttcagcacttactatgaaaaaaaataagtagattatggcagaataaaagtaaaatattttctgcttgatatttagagtgttgttttggcatctgtgacttgtgctaatgacctcgggtttaagtttggtttttattgtctgaagatagctggatttgggagagtaagtcaacaaccttttttttttttttagcaaaactctaaatgtctggatgatctgatagatgcaattcactattcgagtcaaatgttgaatatgtattacaatttaggctgttcttgaagctttattaaattgagcaccaaatcttctgaagctaatggaggtaaaatcatagtcaaacgcccttttaactcaaaagaaccatgcccccaactatttctctttctcaaactattgcttctttcaggctaggatatttgggatattaaagggctcttttaactcaaaatagcaaaaccatagccctcatcttcttatttaggaagacggtctttaacatttaattctgagcacttaccttttccgtaaatgaaattctgtttctcatttggatattggcagagagccaagataaggtgagcattgagcaggataaactagatgattccttaattcagcaaatatattttgattccaattgtgtaccagaaattcttctaggtactgggaatttatcagtgaacaaataacatttctatcctcacagagcttacattctgaaagataggtaataaataattatctatctatctaattgaatcactcttctctctctctctctctgtctttctctctttgtctccccgcttgggtctttcaaagacatttctgcaggagtacagctatgagctgtttagcagtcagtacaacctctggaagatgggtgtacctgcccaataaaggggatctgagaagaccgtcagtagcatctactatagaagataaatgcagtattccaggcaggagattatgatggcttggactagggtggtagctgtgtttacggtgagaaagataagatctggatatatttctaaggtagatttcacaagtttgctgcttgattgagatcagttgcaaggaaaaggaaagtcaaaaatgactatataaattctggtctgagaaactgtgcaaatagagatactgtttactgaaatggaaagggagagatcaagattttcatgttaaatttggtacattcattcagatatatcagtggaaagataggcagttggttatggtagtcttgagttcaggttggttttacaaatctaatttgggtattgatgattttaaaactgaggagttaccatagataaataggaaaagccactctaatgttttgaagttggaaattcaaaaggaaatggagcttttgagaaggagcagctggtgaggcagaaatacaacctagagtgaggaaaggcttggaagtcaatgaagatagtgttttacaaaggaatgcatgattaattgtgaatgctgctgattacttaagtgagaactgagaattgacaaatgaatttagcactgagaagaccttggatgatcttgagaagagctgtttcagtggagtactataaacaaaaacataggagtacattcaagaagaaatggtgggagggcaagaactgaatatcatgagtttggaaaactcttttgaggagttttactttaaagaatttaggcagagaaataagatatatagtagttaagacttaaattggacatattatggcaggttgctatgtaaatgggaagaatccagagaagaggaggaaattagtgatgcaacagagacagtaataactggagtgatatacttgaagaggagaaaagagatgatatcaggcacataaatggaggatttgataaatgtgatgggggctgcagagaaaaattgttttctgatttgctattatttttttcaaagaaataggctatcaactgagtgtgaggatagagcagaagctgttaaaaatttaaggagagttgtgaaataatcatctgtaagcaggagtgtgaatgaactaggaagatgtagtaatatttctggacagccctgagagctgaaatattgtaagaaataatctgaggaagttctgagtacttagacagttgaggttagggggagcattttattaaaacaatcacaaagaacatgggaaaaacagataccaacttggcaattgtcatagtattaaataaaactaattttggaaaattaaactaaaaagatgttatatgcattatgatgtttcaaaatagactagggccaatcagacccaatagtttctttatataagaccccatagtttaattatataattaagtgttacgttcaaattttgataaatgataaatatattgtaccaccatgggaatttgaaaatgcgaccatttgtactgggatattatcatgtaatattttaattttacctcttaattatcaaagtgaaagatttccatgcagtattatttggttgtggggtaattgtttaatttatttggaattttatagtgcttttgcttagccacattttattttgtggtcaaattcaaatgctgatctaatggcttcagagtaaaatgagaaaggtcaaatgggactggaaattagggttttcttcctgtcattaggtatatttatttataaaataactggaaaattcctcatgtatttaacatctgttccttctttccctggtcactgcatatcaagaagactttgacattgaggtttgatacggtttggctctgtgtccccacccaaatctcatcttgaattgtactcccataattcccaaatgttgtgggagggactcggtgggagataatttgaatcatggggtaaactttcccccatactgctctcatggtagtgaataagtgtcacaagatctgatggttttatcaggggtttctgcttttgcatcttcctcattttctcttgccactgacgtgtaagaagtaccttttgcctcctgccataattgtgaggccttcccagccatgtggaagtgtaagtccaattaaaccactttttcttcccagtctcgggtatgtctttataagcaatgtgaaaatggactaatacagtaaattggtaccaatagagtggagtgttgatgaaaagatacctgaaatgtggaagcgactttggaattgcccaacaggcagaggttgaaacagtttggagagctcagaagaagacagaataatgtgggaaagtatggagcttcctagagacttgttaaatggctttgacccaaagcctgctagcaatatggacaataagatccaagctgaggtgctctcagatggagataaggaacttgttgggaactgtagcaaaggtgattcttattatgttttagcaaagagactcacagcattttgccatgccctagaaatttgtggaactttgaacttgagagatgatttagggtatctggtggaagaaatttctaagcagcaaagtattcaagaggtgacttgagtgctgttaaaggcactcagttttataagagaagcagagcagaaaagtttaaaaaattttgtagcctgacaatgtgatagaaaagaaaaacctattttctgaggagaaattgaagctggctgcagaaatttgcataagtaacgagaggccgaatgttaagccttcaagacgatgaggaaaatgtctccagagtatctcagaggtcttcacagcagcccctcccatcacaggcctggaagcctaggagaaaatggttttgtgggccaggcccagggtccccgtgctgtgtgcagtctagtgaccaggtgccctgcatcccagccactccagctgtgactaaaaggggccaaagtacagctcgtgctatggcttcagagggcagcagccctaagccttggcatcttccatgtggtgttcagcctgcagatgcacagaagtcaagaattgaagttcgggaacctccgcctatatttcagaagatgtatggaaatgcctggatgcccaggcagaagtttgctgcaggggcagggccctcatggaaaacctctgctagggaagtgtggaagggaaatgtggggttggagcctccacacagagtccctactggggcactgcctagtggagctatgagaagagggccacagccttcagaccccagaatggtagatccaatgacagcttgaagcatgtgcctggaaaagccacagatactcaacgccagcccatgaaagcagccagtgggaggctgcaccctgcaaaaccaaagcagcagaggtgcccaagaccatgggaacccacctcttgcatcaatgtgacctggatgtgagacatggagtcaaaggagatcattttggggctctaaaatttgactgccctgctggattttgagcttgcatgggccctgtaaccacttcgttttggccaatttctcccatttggaatggctgcatttacccactacctgtacctgcattgtctctaggaagtaactagcttgcttttgattttacgggctcataggtggaaggaacttgccttgtctcagatgagactttggactgttgacttttgggttaatgctgaaatgagttaagactttcagggactattgggaaggcatgattggttttgaaatgtgaggacgtgagatttggagggcccaggggggaattatatggtttagctccgtgtccccacccaaatctcatcttgaattgtactcccataattcccacatgttgtgggaggcatttggtgggagataattagaatcatggggcagtttcctccacactgttctcgtggtcgtgaataagtctcacaagatctgatggttttatcaggggtttccacttttgtatcttcctcattttctcttgccaccaacttgtaagaagtgccttttgcctcctgccatgattgtgaggcctccccagacacatggaagtgtaagtccaattaaacctctttttcttcccagtcttgggtatgtctttatcgccacatgaaaacagactaatacaaggttattctatgagttagaaataattcctctaaaagtaacacttgctgagaatttccctaccttttctgggcttttaaaaatgcatcttattcctcatcccctaaagtgggtgtgttagtcagggttctctagagggacaaaactaataggagatatatatatatatatctcctatatatcctatatatatatagtattaactcacatgatcacatggtcccacaataggccttctgcaagctgaggaacaaggagagccattccgagtcccaaaactgaacttggagtccaattttcaagggcaggaagcatccagcatgggagaaagatgtagagtgggagtctaggccagtctcatgttttcacattcttctgcctgctttatattctagctgtgctggtagctgattagatagtgcccactcagattaagggtgggtctgcctttcccagcccactgactcaaatgttaatctcctttggcaacaccctcacagacacacccaggatcaatactttgcatccttcaatctaatcaagttgacactcagtgttaactatcgcagtgggtaaaagccattactaggcaacccaaccgttgctgcaggttgatgcagcaatgagtaggaagatgtggtgggaagatgtgggagtataaacttcgccaggcagtaatataggtatataatacatgagcagggctgcaatactctcttaggaactggacagctttatgggccaaaccaaacctcaaaacccagctgcccacctgacacaagactgtccatgggagtgaagttctgcagggttctttcccatcattatcccaggggaagagttactctagagaatgcccacttaaaaggtatgtgagtctgactctgcagatcacccactgtctacacagctcttgtttctgaagagctgtccttgcattgtcaataccttggtgcaacatatgtggcttcctgcccttctgccaagtggacctcctcactttgagcacatggtaagcatcctccataggtacacaaagtttgtagcaactaactcctatctggagttactcagacccactacctctcctgttagtgcatctatgctcttcacaaagtacagtaagctctgcttcacttgtcttgaaaacatgaatttgttctaatgcaatggacatattggagaagaatttgatgaacagctaaaaaaagcaatagtataaataattttcatggctctacatgtaacctctggaatgcataacaatgcttttttccataagaagatgtttttctgtgcttgtagattattcttttagacctgtaaagaatgcttggaaataattgatgaagtgccaagtccactaagtttctgtttttagcttctatcctgaagtttctcatattctttacctttacatctctcagtgtgagctcatatgaatctgtggcttcaggtcccatgtatatactgatgacacccaaatctcttcttgaatgaccaaagaccaaactttctgagtcacagatttttatttacatctgaatgtacccctagtattttaaatttcttaaatataaaagtttaatatttctcatacccacttatgtatatgcatgtgtgagtgtgagtatgagtgtgtgtaccacatatacttactatgtgtgttaggcattgtcctatatgtttcatatctattaactcattaattccccaaacagccttatgagttaagtcttctcattatgtccttataataaatgaagaaactgaagccaagggattaagtaacttatccaaggtcaatgaaggagctgagatttaaatccagaaaatctaattccagaggacaaccattttccaaacatcatgcaatccaacaaggtgaaagcctgtaaggattatttcaattctttatttgaatctctgcttcagcaagcacattcactggaggaaagatatccagcctttggttacagagaaggcatgctctcagaaggctcatatttggtttacagttacttgctcattgatttttgtgagttcctgaaacttacagaactttcttaggtgttcagtcaaattgtaaactattatatgaatagtgtccatcatagttttcatatgaacgttaaccaaggcctctcaatcacaggtggaacatgtgagcataaggttaatatcatcaagtaactggtgataaggctaaaatgatggatgaaagtcagattgtggaataccttaaagggcagaccaacaaggtttaaggactttatcttgctgttggtagtaataattttttgtaccaggagtttgccatgagcttcagaccatgtttcaggaagaatcagttgggcctgtgtgtgtagttcctggatagtagagcatgcacagaccttgagtgcactcactttaggggtcttacagtctggtgctgtggttctccaactttagtgtgtatcagaatctcttggggaaacatgttataatatcctgggagggcttcataccaggactccgtcttcagagattttgtttcagtggaaatggatttaaaaggcagtgagctgcattttcataaacaccactcttgaagatgataatgcaggttgtttgagaaacactgatctagtggctgtggaattgatgtaagtgtcaggcaaaaatggtcaaaagtaggatagttggaaagtaagaggtggaatttcaattctgaatggccatttgagcccacatgttttatttatttatttattgcagattctcagtaaacacacacacacacacacacacacacacacacacaacctacatccatcctgaaaaacaggaaaggtttccatgcagaggtcaaaaactgtgacgtatatctgccatatatagtgcctggaggaccaagctgaggaaagaaaccatcagcttaaaaacccaggcacaaattgaaaagcattcaagaaaagcaagtgcatgggattcctgagaaaaacttcatcaaaccctcaagtgtgaagtagagtaactggaacaaaagcggaagcatgacagtcagcataagtaaacctcaacttaaacagtctcaaggagccagaggtcaccagataagccgcctagggaaatgggttgactgagtctcttgcagtgatcagttcaggataggactgcttaaagtaagaaactatgagagttaatgacagaaacttgtttgggtaatgctcacttttagaaaatagagaaaagacagtcaacagagctgataggaaacttgaaatctatgcagtggcctagaaacaacaacaacaaaaggagtgattttcaggagaatgtggttaaattgccacaagatatacaaatgtcaaacaacatgaagataaagaaaagatcaattgtttggcaagttggtgctcatgtcatctttgtgagagatttcagcagagtggtgtgaacagaagtcagattgagggggtggaagaaatgattaagagatgaagaaatgaagtcatcaaaggttcaacagtctctctgtggtgtgtgtgtgtgtgtgtatgtgtgtgtgtttgtgtttagtagcaaaaaggaaagagggttggtagctgcaggggtaatcagagtagaatatttttatgagccagaggtcttctcttcatgtatggtgagaaaaggaaaggaaccagaaagaatagtaactattcaagatggcgaggagtaaggtgatgattgatgatggatcatgtgttgtgggatcagggtctctttagagttaatataaatcaaatttcagggccatgaagtaagacagtacattcatattttattgtagttaattaattctcttaaaaagggaatataaagggaaggtaatagttgcatatttatagattgtagtctaatatgagctgatttataaaatgttggcattatgtttttgaggtggtaggataaagaaaagaaagtgaaaactttaagtgtagggttgagtttatcaggaatgtgtttgatatagacttgtgagtggtaatctggaatatatctagtatctaaagatactaaagaaaaacaaagggccagtaggccttataggagaaaatggattcatagctcttaagggataaaagtgaaaaaatgacagatcaatatggctgttgttactagaaccattcctttgtttggaaaaagtgttagttactcttaaataatttaatgccaaaacaaaatacaacattaactgaaaaggagaatataaagttatatcaacactataattataattatttaaaattacttatgttgtggataagagttggaaggaaatatttttttttttagaaatatgcaattttgggtaatgtcaaattatttttcttcttcataataatttttgcagaaaaaatctaagtatagctaacattagcttatgaaagtaaggtgttttattcagatctcataatctcagatcttttgaatgggttgttgcaaagggattaacaaaaatgttgcttgctttataccgttctgcataggtagctatacttattaacatgatagatgcaaactggtgttcagttgattataatatattatttttgcattccagatgtcatttcctatgggcaatgagtttgcaatttcccaaatgtaagaatttaattttttcctgctctcgtttctgatgtctttaagatctttgatttttttttctatttagcagcaccaaccgaattttcccataaagaaatatctcattaacccaattattttcccataaataattaacctaattatagactatcagtttctgcattatgaggtatttataaagctgacagaattaagaatgtacattttctcctctgctctttatctgggacaacacgttggtcaaatttctgttatgagtggctttagaatgggagacttccaaaggattatgttgtactggtggcactatatggcaatggggggtgtcagtaggcataagggggttacccttattaacatctttggaagctcagaattaaatctatgtaatttttatatgctattgctcctcctatagaactctgggtctcaaccttttgtctgtgggcaaaagttcacatgcacaacaccatctaggttggtctgtgttgcacatggctgctgaagatgtaagagagactgtggattctgtgctgtttctcaggccctcactataatccatcgtttgccctcccatagacttgaattatgacaaccaggctgggactcatgctatgtagaagacctttctggagatgagttaaagatacgtagtccaagcattgtggcaggagccattctttaatagtttcatgtcttatctgtaaataatgttgtttactacaaagcataacctccaacttaaatcttctatactaagttgtgagcaaagaattgagcacacaacagcaagatctaggttactcctttcccctccattcacgtaaaatcttatgtgaatgagtatgtgattcagttactgaatcagtaaactggtcaataattcacttatttcacctaagaagaaacatattcttttttaaaagcactgaatattatattgatgttggtattataatacaatggaattgtgtctacctagtacccttatttctagatctcaagtgactaaacagcctgaatctggaaatacagagaaaaaatacacaaagagtcgtgaatttaaatagcaattctgtcactaactggctgtttaatttgagtgttttatttaagctgtgtaaatccaggcttctcactgaaaaatagagataatacatagattatagcattatattgtgaaagacacaagatagtgaacatatagttctttgccctgtatctggtacatagtaggtgctcaaaattactagttttttaaaaataattatcctcattatttggtgtcttcaatgaccttcttacatagtccattatgataataaatgcaattaattttttgttcatgacaccctgaaggtgtttctgtgtcagattcactcagagacctcatgatgaggaaggaacatggtggcgaatcttaccctggtgatgccaaacacagcagtgactcataaccattccagcactgcctatgaaatggatcaattaaaggacggtgacacacaaagatggctacttccagagggagaccttggaaattcttttatgttaacagtgtaccccacacaagaataggagaaccacattctgtcagtacactggggaagttttttcaaaatatctctggactgtgtagatttctggtaatagaaaatatgatctgccacttcaatctactgaatactgtccgtttttttctatataatggcttttaggaactgttgtgaggcatcctaagtattatctagccatccatccatccatccatccatccatccatccatccatgtatctatctaatctatgtgattatatgtgtagagcttattcatacatatatatatacacacacatacatacacacatagttatatgtatttatacacacatatacatataatgtctttatcagcctgaagtatggatttttaaagtggtaatattgccttacttattgtttctcatccactgtgacattctatgttatttcagtaagatttaacaagcaaagtgatgatggatgagagttcctttgcagcctggtgagatttttacttcatgtaaagcaaagcattttggggcaacatcagggataaacttgtggaatgaatcatttggtttttctttagtatatcctgtccaccattgggaaccagattcagtaattatgttctctggtttgtactcatcataatgtcttgacctccagctctgaaacaacatatttcctgagagatgctgattgtattttgtgaggttctgcagggtcaagtaaattgaggatgtctttattctgcatttgactaatctgaattagatagtcttagccattaaaactttagaaagcacataatgaccaattacaagtgagagaatttttttcaataatgctttatattttctaagtaccgatacagatgttttattacatttaaaacatgattgccctaccacttcacttatattttaaaaactaagttgccatcttgtaaaaataaatacatggatatcatttacaagtgatatcagttaatacctaatgtgaacatccattgtgtactgagtctatgaaatactactagttactatgaaaatgtgagattcaccgaatcgggtggagcatcaactttattatccacataggttacccatttcttatatcatagctttggttgtataatttatttcaacagagtttagttaaacattttccactgttattaggtactgccactctacattccagtaaatattgccaccatgttgcagaacaatttttggacaaccaggcatatctttggagttgaactatgtggaggtactactggtgctgtgagggatcacctgtaaacctggcagttttaggtggcctctagacgttatagggtcaagggagaaattttttttgttcttgttgtttaatactgtgagtacatttaaatgctcatgtaaaagagccaacttagagggagtggttgaagacacaagagagataagagctgattgttatggcaaggtctctggctaggcagaagtgaatgggtcgaagagaacagatttaggaactgaccttctatcaggagaacaatatttcttccaatgtcatgggggaacatagagactcagggggtctgtaaccatgtatggcccccaaaggactggacacatggtgagcaactatggtaggatgaagggaggcatgttaggaaatgtccagctccgaggcctccacgtgacccctaggtgagaagctgccatgattccttaatagggagcaacacaaagactaaaatgatggcaatgtaagggttaaggaaaaggtgattttaaaagcttcttgagggtaaagtccatctgtgttcacttttgtgatctttgttgcatccttctcaatcttgcatattgttgatctcaaataagtttatggtatttattatgttcaaaaaagttacagtttcttaagtttcttctattttcttaaggaaggaggtgataggatggagggggcatgatgccaacttgactctcctgcttaggacttgcccttcttttaaatggtgaacacagagttacattatttaatgcataatgtgaaagtgacagaggccctgattattggagtataaaattttatattattatggaggctaaaaagtacatgactggactttttcatacaataattcaaagtaagcccatggaacatcctcttcaaatgaagttgacgtacgtctcatctccctggattggatgcccaaccctcacccttgaaagcagcttgtggataactcagggcaaacagaagcagaaccctcatgaaccttctctcttctggaaattttggatggcgttacagaatgaggcaaaaataaagttaccttcttctcttttcttggattaaagatcccagagccattctcctctgtgttctctacttggaccttgtatagtgtaggatatagccaggaactaaggatcctcggttgactcatagtcggcagagggtgttatggccctcctgagagagtgaccttgaggagagaatctattcagatggttttatgacaagaccaaagtaacatttcttagttacctcttagccagagtttagtgttaagtttgccctgaagtatagttttcaaaataatgagatcaggcatatgctattttgactaagtagaatacccaataaaataagtcattcaagttgtgactgaaagttcggatggtccttatggaatcaaggtgaccaaataacatgatactaaaccagaagtgagtcatgttgtttatcatactgtttttataaattttgtataatacaaccccatacgaccccacacagttcaaaacagtagtggttactcactccatggagaagatgtcaaaagtaaaaggaataatacattggttatgatgtctgaaattgggcacataagcatttagttttgttggtgaataatgttcagaatgaaaattgacacactctttggattatcaagctttttaaaaagtataattaatcagttttttaatgaaatatacagaaatataatggcagctcttctattagtgaagtttcctgaggcagctggattgattgaaggctttacctggttcatttggattctacttgtaaagcatgaagaaaccaactttagggtcaggaattttccataagtcaggttttttttaaaagccatataatcgatgcagatatcaaaacattaagatgagataaaaatagcttttaatcaagtaagttaaattaaataactgttaaggttcaaatcatgaattaaatctagatgtttggcaaagacaaaaatctttataaaaggataaaatagtctgggaataaagtatttgtcattcccatatcaaatgagaacaaaactaataattttattaactttaggtttttattgtattaaataacatcatttttatttactttatcacaaggtatatttttctttattatatgtctttgtagaaaacctagtaacattcctgtgtgactgaatagattaatcacagatatacccatctggaaaaatgcatgctactataagagatgagtgaaatatataaaatttatattttaattcttatgctaattagttaaatgggggaagatgtatgtccagaatatttgctcttaataggacatcgtagtgaaaaccattccaatgatgatgactaataaatgtgtatcttcaacattgtataatgcccaggaatatttccaaataaagaatttctaggtaagatgtttaacaaatatatgatacttttgttttctgggtgaatgttcaaactaatttcctggggatcattgtgctcagtacttatagtatcattaatattattgttgacatataataataaccaaaaatatcctggtcagataggttttttcttttttagctgattcataatcattgtacatatttatggggtacagaatgatatttcaatatgcgtatacaatgtgtaatgatcaaatcagggtaattagcgtatacatcacctcaaacatttgtcatttctttgtgttttgaacattgaaaatcctctcctctagtttttgaaaatacacaatggattatagctaaccatgtttacccaacagagctacagaacaccagaactcattcctctcatctagctataattttatatctgttaaccaactccttcccatcctcctcttcccccatccttcccaatctctaatacccacaattctactttactaccatgagctgaattttttattttagctccctcttatgagtgagaatgtgcggtatttatctttctgtgcctgacttatttcacttaacataatatcctccaggttcatccacattgctgagaatgacaggatttcattatctttttgtggctgaatagtatttcattgtgtgtatataccacattttctttatctatttgtctgttggtagacattaaggttgattccatatcttagctgttataagtagtgccgcaataaacatgatggtagaggtatccctctgatatattggtttcctttcctttggatagatacccagtaatgggattgctacatcatatgttagttctatttttagtttttaaagaaatttccagattgttttccataatggctatactaatttacatttgcaccaacaatgtataaaagttgccttttctctgcatctttgccatcatttgttattttttctttttcataatggccattctaactggggtgagataatatctcattgtggttttgatgattagtgatgttcagcattttctcatatacctgttggccatttgcaagtcttttgaaaagtgtctattcagatattttgcccacttttgaatcaccttatttgtttttttctgttgaattgtttgagttccttgtatattctggatattagtccattgtcaggtgaatagtttgcaaatattttctcccattctacaggttgtctcttcacactgttgattgttttcttttctgtacagaaactttttagtttaatatagtcccatttgactattttcgtttttgttgactgtgcctctgaagtcttagccaaatagtttttatttccttcaaatagctttggcatttgagtaccacttcgctcattccagaaaagcaaccacccaaccaaaagaataggtttttaatttttttttaattattattatactttaagttttagggtacatgtgcacaatgtgcaggttagttacatatgtatacatgtgccatgctggtgtgctgcacccattaactcatcatttagcattaggtatatctcctaatgctatccctcccccgtcccctcacctcacaacagtccccagagtgtgatgttccccttcctgtgtccatgtgttctcattgttcagttcccacctatgagtgagaatatgcggtgtttggttttttgtccttgcgatagtttactgagaatgatgatttccaatttcatccttgtccctacaaaggacgtgaactcatcattttttatgtctgcttattattccatggtgtatatgtgccacattttcttaatccagtctatcattgttggacatttgggttggttccaagtctttgctattttgaatagtgccacaataaacatacgtgtgcatgtgtctttatagcagcatgatttatagtcctttgggtatatacccagtaatgggatggctgggtcaaatggtatttctagttctagatccctgaggaatcgccacactgacttccacaatggttgaactagtttacagtcccaccaacagtgtaaaagtgttcctatttctccacatcctctccagcacctgttgtttcctgactttttaatgattgcctttctaactggtgtgagatggtatctcattgtggttttgatttgcattcctctgatggccagtgatggtgagcattttttcatgtgttttttggctgcataaatgtcttcttttgagaagtgtctgttcatggccttcgcccactttttgatggggttgtttgtttttttcttgtaaatttgtttgagttcattgtagattctggatattagccctttctcagatgagtaggttgtgaaaattttctcccatgttgtaggttgcctgttcactctgatggtagtttcttttgctgtgcagaagctctttagtttaattagatcctatttgtcaattttggctttggttgccattgcttttgatggtttagacatgaagtccttgcccatgcctatgtcctgaatggtaatgcctaggttttcttctagggtttttatggttttaggtctaacatttaagtctttaatccatcttgaattgatttttgtataaggtgtaaggaagggatccagtttcagctttctacatagggctagccagttttcccagcaccatttattaaatagggaatcgtttccccattgcttgtttttctcaggtttgtcaaagatcagatagttgtagatatgtggcattatttctgagggctctgttctgttccattgatctatatctctgttttggtaccagtaccatgctgttttggttactgtagccttgtagtatagtttgaagtcaggtagcgtgatgcctccagctttgttcttttggcttaggattcatttggcaacgcgagctcttttttggttccatatgaactttacagtagttttttccaattctgtgaagaaagtcattggtagcttgatggggatggcattgaatctttaaattaccttgggcagtatggccattttcacgatattgattcttccgacccatgaacatggaatgttcttccatttgtttgtatcctcttttatttccttgagcagtggtttgtagttctccttgaagaggtccttcacatcccttgtaagttggattcctaggtattttattctctttgaagcaattgtgaatgggagttcactcatgatttggctctctgtttgtctgttgttgctgtataagaatgcttgtgatttttgtacattgattttgtatcctgagactttgctgaagttgcttatcagcttaaggagattttgggctgagacgatggggttttctagatatacaatcatgtcgtctgcaaacagggacaatttgacttcctcttttcctaactgaataccctttgtttccttctcctgcttaattgccctggtcagaacttccaacactatgttgactaggagtggtgagagaaggcatccctgtcttgtgccagttttcaaacggaatgattctagtttttgcccattcagtatgatattggctgtgggtttgtcatacataggtcttcttattttgagatacgtcccatcaatacctaatttattgagattttttagcatgaagggctgttgaattttgtcaaaggccttttctgcatctattgagataatcatgtggtttttgtcttcggttctgtttatatgcttgattacatttattgatttgtgtatattgaaccagccttgcatcccagggatgaagcccacttgatcatggtggataaactttttgatgtgctgctggattcagtttgccagtattttattgaggatttttgcatcaatgttcatcaaggatattggtctaaaattctcttttttggttgtgtctctgcctggctttggtatcaggatgatgctggcctcatcaaatgagttagggaggattccctctttttctattgattggaatagtttcagaaggaatggtagcagctcctccttgtacctctggtagaattcggctgtgaatccatctggtcctggactctttttggttggtaagctattgattattgccacaatttcagatcctgttattggtctattcagagattcaacttcttcccggtttagtcttgggagagtgtgtgtgtccaggaatttatccatttcttctagattttctagtttatttgcgtagaggtttttgtagtattctctaatggtagtttgtatttctgtgggatcattggtgatattccctttatcattttttattgcatctatttgattcttctctctttttttctttattagtcttgctagcggtctatcaattttgttgatcttttcaaaaaaccagctcctggattcattaatttttgaagggttttttgtgtctctatttccttcagttctcctctgattttagttatttcttgccttctgctagcttttgaatgtgtttgctcttgcttttctagttcttttaattgtgatgttagggtgtcaattttggatctttcctgctttctcttgtgggcatttagtgctataaatttccctctacacactgctttgaatgtgtcccagagattctggtatgttgtgtctttgttctcgttggtttcaaagaatatctttatttctgccttcatttcgttatgtacccagtagtcattcaggagcaggttgttcagtttccatgtagttgagtggttttgaatgagtttcttaatcctgagttccagtttgattgcactgtggtctgagagacagtttgttataatttctgttcttttacatttgctgaggagagctttacttccaactatgtggtcaattttggaataggtgtggtgtggtgctgaaaaaaatgtatattctgttgatttggggtggagagttctgtatatgtctattaggtctgcttggtgcaaaggtgagttcaattcctgggtatccttgttaactttctgtctcgttgatctgtctaatgttgacagtggggtgttaaagtctcccattattattgtgtgggagtctaagtctctttgtaggtcactcaggacttgctttatgaatctgggtgctcctgtattgggtgcatatatatttagtatagttagctcttcttgttgaattgatccctttaccattatgtaatggccttctttgtctcttttgatctttgttggtttaaagtctgttttatcagagactaggattgcaacccctgcctttttttgctttccatttgcttggtagatcttcctccatccttttattttgagcctatgtgtgtctctgcacgtgagatgggtttcctgaatacagcacactgatgggtcttgaccctttatccaatttgccagtctgtgtcttttaattggagcatttactctatttacatttaaagttaatattgttatgtgtgaagttgatcctgtcattatgatgtcagctggttattttgctcattagttgatgcggtctcttcctagcatcgatggtctttacaatttggcatgtttttgcagtggttggtactggttgttcctttccatatttagtgcttccttctggagctcttttaggcctggtggtgacaaaatctctcagcatttgcttgtctgtaaaggattttatttctccttcacttatgaagcttagtttggctggatatgaaattctgggttgaaaattcttttctttaagaatgttgaatattggcccccattatcttctggcttgtagagtttctgccaagagatctgctgttagtctgatgggcttccctttgtaggtaacccaacctttctctctggctgcccttaacattttttccttcatttcaactttggtgaatctgtcaattatgcgtcttggaggtgtgcttcttgaggagtatctttgtggcgttctctgtgtttcctgtatctgaatgttggcctgccttgctagattggggaagttctcctggataatatcctgcagagtgttttccaacttggttccattctccccatcactttgaggtacaccaatccgacatagatttggtcttttcacatagtcccatatttcttggaggctttgttcgtttctttttattcttttttctctaaacttcccttctcgcttcatttcattcatttcatcttccatcactgataccctttcttccagttgatcgcattggctcctgaggcttctgcattcttcacgtagttctcaagccttggctttcagctccatcagctcctttaaggacttctctgtattggttattctagctatacgttcgtctaaatttttttcaaagttttcaacttctttgcctttggtttgaattttctcctgaagctcggagtagtttgattgtctgaagccttcttctctcaactcgtcaaagtcattcttcgtccagctttgttccattgctggtgaggaactgcgttcctttggaggaggagaggggctctgctgtttagagtttccagtttttctgctctgattttccccatctttgtggttttatctacttttgatctttgatgatggtgatgtacagatgggttttgggtgtggatgtcctttctgtttgttagttttccttctaagagacaggaccctcagctgcaggtctgttggagtttgctagaggtccactccagaccctgtttgcctgggtatcagtagcggtgtctgcagaacagcggattttcgtgaaccgcaaatgatgctgtctgatggttcctctggaagttttgtctcagaggagtacttggccgtgtgtggtgtcagtctgaccctactggtgggtgcctcccagttaggctgctcgggggtcaggggtcagggacccacttgaggaggcactctgcccattctcagatctccagctgcatgctgggagaaccactgctctcttcaaagctgtcagacagggacatttaagtctgcagaggtcactgctgtctttttgtttgtctgtgccctgcccccagaggtggagcctacagaggcaggcaggcctccttgagctgtggtgggctccacccagtttgagcttcctggctgctttgtttacgtaagcaagcctgggcaatggtgggcgcctctcccccagcctcgctgccaccttgccgtttgatctcagactgctgtgctagcaatcagcgagactctgtgggcgtaggaccctccaagccatgtgtgggatgtaatctcctggtgtgccgtttttttagcccgtgggaaaagcgcagtattcgggtgggagtgacctgattttccaggtattgtctgtcacccctttctttgactaggaaagggaactccctgaccccttgagcttcccaagtgaggcaatgcctcgccctgcttcggctcgcacacagtgtgctgcacccactgtcctgcgcccactgtctggcactccctagtgagatgaacctggtacctcagatggaaatgcagaagtcacctgtcttctgcgtcgctcatgctgggagctgtagactggagctgttcctatttgtccatcttgtctcttcctcgatttttttttcaggtttttaatttttttaattcatattttgatattcttcttaatgctagatgtaagtaaattagatttttccctgttaatattttataaaccattttttcttttaatttagtgagagtgacagatagaatgatttactctgaattactcttcctcttgaaagattaaagcttgctcttaagtaaagtttgttatgcctatctgttttgtcttcggtttatttttttccatggagctgcttcttccttcttacaaaatgaagttctggaggaccaacaggtcactacatgtattcatagttatataaattctagcaatggtaacagtttggctcatgttggggcctggctacatgttcttcattcctgtttaataaatctcatctttctaccatatgctagtaatatatggctggaatgctggtatgggaattactcccctctttgctgaaatagttcatctcttgtgtccttttcccctttttattcttctattcttcttagcctaagtgatggttgtgattgaattcagaagtttgatattcctactcggttcatgtccacccaaaagcagagaggagcccatcatcatcatttgttttgaatctgaatcccaagcaggaaaaataactccaaggctcttacttaggctgtcgtgtctgttctgtcatgcggtgagtcagcaacactgactgcatttattcttctgggaattgttcttctaggagctgtagtagtcatggtacctccctgcaggagttcatgaattaataggactcatagtgcaaagtttctctgagaattttctataacacaaactccttaacttcctggtgggtaatgttttctgggtgttttttctgttttctgtttttttttttttgtcatttcttctttagtaaaatgaaaattgcaagtagaaaagaaactaaaaatggatttagtgtgaggacaggttccttttcctggcaggattgtagaacactggtattcagttgactgtttacaatgaatatatcttctggttggtcatggccagaagagaaaatgtcattggtttgtgcccaagcaaattgattattaaaatacgttgaatatgaccccatggttgcaaacatcccttttcttagtaattcttagagatgaagaaagtcttttatctgttttctatttcaactttctgggtaatctctatcctttctttttgataagtctctgtcttccctctatcagtgtgaataatgttactattgaaaaactggttccctagctacctcagtcctggggtcttaaggtttcttcaaaacgtgacagtcatgttaaaatgaaattctctgaatttatttagagcactgtttgtaaaagtgtaagtgttattatgcagccttgctttcctacctacctgaattctctcccctactctccccaactcatattgccagcagtgggtagctggcaggatgtttgaaagatttcttcttcacaattcaaaaggcttggtcgagtgacaggattcatatcccaaacctcaacatcacacaatactcccatgtaacaaatctgcacatgtacccactgtattgaaaataaaattaaaaaaactaaaaaaaagcaaaaaagcaaaaaaacaaaaaacaaaacaaaacaaaatccctggtatatattaagagtcccagtgacctacttcacttgcaaattaatggccatctagagtgtggagtttggttgaatgatttatactgcattgtgattctaaaaattaattatttttaatttctttgatactctagatcagttttctaaggtaaatgtgaagtacatcagtgactccaaactcaattgaggtctcccgattttcttggactgactatgtatattttaaagaattatttactttcatactttgccaagacccagacagaaagaagctttcagtgttcgtggcagcagaaaagaatactaataagtgttagtcatccacagtaaattaaaaatataataataaaggaaaattaaactgctgtgtgtttgggtgtttgctctatcaccataaattcacaacctcatcttctagtctctgaaaaggagtgggtgtggcaggaagcatttgtgaaattccattagcatttttagagacaattactccactaaatgattcagaattcagctcctagcttctaagattctacttaggcttatgaagcattttattctgcaacagagtatacatataatgtagaattcctaggattgaaaaacttgttagcttccaacccaaattctcttacttttagatgagaaaatgctgatgattggcctaaagtcttatatctactggtggaggagtggaaattcactcgtttaccttcgcactggaggtagattcaaaatacttcagaaacgatgttagactagagcataatgcttggccattgataaataaataaatgaatataagatgttgtgccctgagattcagaattggcagcaagaatgtgggtattataaaggtatatttttcttcttgccttattattgaataagagtacttgaaaatggatgaaggcaaccagatgttgagtcagatttcctgagctttgaattttggacctgcattcatttcatttctctaggaaggttgcccccctctttatttgttcagtgcttataccagattttattatactggagatttctaaagcctccaaccaaggaagattccctgacttctgccttgctgctgcaccacacaaataaccatatcaatttatattgcactattctcaaccccacaaactccatttagacctaacagctatggacagtggccctaatttcctaggaacatgatcattttgttcttgtttggtgtctatgccaagctccaaatcacaaaaagctgttaattccaattaccttttgcaaaatccattttgaagtcttctcacagatggatgtatttaaaacacctagaaggttaacatcctttgtgaggcctcagctttgacttagaaaaagctcatgccacagtgtgtatgtgtgaacctatttcctaagagctgatatatgcccatggtgtctcactgcagggctggtgataaatgatgaaaccatttagtgcataaactcatataacctttcagcagaatcaataatttagttgcaatttagttgcatacctaaaacaatgcaaggttgaagaaccctgagaagagtggtagctcctgatgacagaaataggagtctcaggtattcttcttttgtttcccaagtggtatcaagcatgtgtctgactcactggtgctattttacattgtgaaggaagtatggatgagggaaggcaaaaccagtgcaaatattctagatccacttatttccttcccgctttcccttcctctcttcccctccttcctttcttcttctcttttatctcttccttcctaaattaatatttttgagggtaggtaaaatagctatattacttaaaagtcaaactttataaaaaggtaaagcggagatgtctgtctcccaatcccatctattcctccttcaccctgttccccatctatgagaaattatatttattagtgtcatgtttattttttcagtgtttctatatgtaatactcattatatgttatacaaacacaaatatacatatacataatttccttccatttttatcaatttccttcctttctcactgtcctgctcctagctttaattttaccaattartaaaacatactaaagatttttttcatatcagtgcatgaagcttttcctcttttttctttcaactgcataatattccactatgtggaaatatcatggtttatttaaataaattcttatcagggaatatttgagttgttccagggttttctttctttctttcttttttgctgtgaaaaacaatgttacagtgaataactaacatcatttctcatttcatatgtgtacaaagtatctgtgggatagagttccagaactgaaattgctgcttgaaagggtaaattgtttctgtggatttgtagaaatttccagatttccctttatagtagttacaccattttataatcctacagcaaagtctgaaagtgtatttttcacacatcctttcaaaaacattcaaactttggatttttgtacatctaattggtgagaaatgatatacttgttttcattttcaatctattcttatagatgaacctggacatattttcataagtttaataaccatttgtttttctttctcggtaaaccgtatttcctttgctaatttttcactgggcatttggtgttgatttctgtcaaatctttacaaagtagagaagtttgtactttgtttatgatctgagttgcaaatacttttattccttccttgacatttatcatttgccttaacttatggtgaatttttaccatgcaaatgtttttgattttcatgttgttcagtatgtcaatatattttatattcattacattcattagtggctaaaacttcccaaatgttggtaggaatatggatgtctagattagtgaggctcaaatgctccaggcaagatcaacgcaaaaaatacttttcctagacacattaaaatcaaattgtcaaaatcaaagacaaagtgagaattctgaaagcagcaagagaaaaactactcatcacatggaagggtactcacaaaggctacaagcagatttctcagcagaaactttgctgggcaggagggagtggaatgatgtattcggagtactaaaagaaaaacaaaactgccacataagaataatgagtctgtaaaagctgtactttagaaatgaagagacataaaatcattcccagagaaaagaaagctaagagagtttatttccactagacctgccttaagagaaatgccaaagggagttcttcaagttgaaatgaaaggacccgaagtaacatcatgaaaacacaggaaatcccatagctaacatcatactcatgttgtaaagccaaaagcttttccattaagatcagcaagaagacaagggagttcactctcaccacttctattcaacatagtactgggagtcctagccagggccactaggcaagaaatggaagtaaaaaatatccaaattgtaaaggaagaagttaaattgtctctatttgcataaggcatggttttttataggaatctctaaaaacttcatcaaaaaacttaaaattaataaattcagcaacgttgcaggatacaaaattaacatacaaaatccagttgcatttctgtacattaacaacaaactatttgagaaagaaattacaaagacagtccgtttacaatagcatgaaaataataaaatacagaagaataaatacaaccagrgatgtgaaagatctgtacactgaaaactataaggcattgatgaaagaaatttaaaaatacacgaatgaaaacatattttatgtctatgtattagaagaattaatattgttaacatgcctttactgtccatgtaatatacagattcaacccctatcaaaattccaattgcatttttatataaaaatgtgttgggtacattataattctattctagctatttgaaatatataataaattattgttaactatagttttcctactgtcctatctaatgctagaacttattccttctatttaaccatatttctgtatctattaaccaacttccaggctgtgtgttgacagtttttctaagagttttcccaaggcaaagagtaagtggaagtcaatcttaaatcactgtgtctggccgtgacccgtgataaaagatttaatggaaaatttcagtttagatgagggtaacagacattcatcagatactgggtgctggagatagattcagagctaagtaagaaatcctatttttgagattaagtaatctcacttcacacccagtgacactgcaactgttgattaagagttttccagtctctttttatccccgttagcctacaggagcaggtaaatatctagttccttctgggtctgaagattctgtaaacttaaaaggagagatcctttctgatttgtatattattggattttctaatgtccatcacagcaccggatttaacactcacacacatgcacacacacacaggatatattgaatgagtaaataaataacagacaggagagttgttactaactgatctctaatattaccttattgttctaataactgtggatttgatataactttgggagcaagcaaggtatcagtcttaaagtatagacaaatttactatgtcacctcagatactcaaatagagaatatcctatgcccaaatggcaaggctgaattgayccaagtgattaagtcatactcttaaaactgtataacctaataaccttttattaagaataagttcagaaaaacagttcacaatttctttttacttaaattgtatatattatatgtgcagttttcagatgtgaatgggatttgagatcagaaaggcagggcttcatactgcatttctccaacttgctctctatttgtcctttagcaaaagacaatctttccttctttactttttatttgttaaacacacacacacacacacacacacacacacacacacacacacacacacacacaacttcatagcatccaatgagcagtatctaggtacacggccaatgcaaagcactcattttcttatttctccttcacatgtttttcattcctattttccatctttgccatggacaagacttcattccctagctgtggctttagaataacagtatgactagatcatattcatttttagcttagcacattacctcccatttagttgaaatgaatatcaacaagaattcacacttctaaatgcttgaaagcacaatgtccatccaagatccaagtgactgaaataataagagccttgttatatgaagaaatacccattttcatgatgttttctgaggcattaactgttactctgaaaagaaagaagagtgttggtaagacttgggtatgagataaaacaattagatatttgcttataaactggaatgaccttgtaaatggcccaggagcaatgtaattaaataccataaaagctcagaattccattgtgccccctggaaacatcataattgcctcagtcattagctttcagggtttcagccttaaaccaggatatttctagtctcatcaaaactatacattagcattcagtgacttgtaagagtaaacttccttctagatagtcctgtgtgcttatgaagtacatccaaatgaacatatgacatgaggtggagtacaacttaaagttgccttctttcatcctatatatttttgtttattcttaatgtatcgtgaacttcagtagagagcaaacaagttgtctttataatttgaagttttgctttctctttttgaaagaaaacgcataatttggagattccatctgtgaaaaaaacttaattaaacaatgttaatttttaaaattctattatgtataaggtgtaaggaaggggtccagtttcagttttctgcatatggctagccagttttcccaacaccatttattaaatagggaatcctttccctattgcttgtttttgtcaggtttgtcaaagatcagatggttgtagagtgtggagttatttctgaggcttctattcttttccattggtcataaaaaccctagaagaaaaactagaaaataccattcaggacacaagcatgggcaaaggcttcataactaaaacaccaaaagcaatggcaacaaaagccaaaattgacaaatgggatctaattaaactaaagagcttctgcacggcaaaagaaagtatcatcagagtgaacaggcagcctacagaatgggagaaaatttttggaatctatccatctgacaaagggctaatatccagaatctataaagaacttaaacaaatttacaagaagaaaaacaaagaaccccattaaaaagagggtgaaggacataaacagacacttctcaaaagaaggcatttatgtggccaaaaaatatataaaaaaaagctcatcatcactggccatcagagaaatgcaaatcaaaaccacaatgagataccatctcacgccagttagaatggcagtcattaaaaagtcaggaaacaactgatgctggagaggatgtggagaaataggaatgcttttacactgttggtgggagtgtaaatcagttcaaccattgaacttgtagatagacaacttgtagatagacagattccattgtggaagacagtgtggtgattcctcaaagatctcaaaccagaaataccatttgacccagcaatctcattactgggtatatatccaaaggattataaacaattctcctataaagacacatgcatatgtctgtttactgcggcacttttcacaatagcaaagacttggaaccaacccaaaagtccatcaatgatagactggataacaaaaatgtggcacatatacaccatagaatactatgcatccataaaaaaggatgagctcttgtcctttgcagggacatcgatgaagctagaaaccatcattctcagcaaactaacacaagaacagaaaaccaaacaccacatgttctcactcataggtgggagctgaacaaagagaacacagggacatggggagtggaacatcacacactggggcctgttagagggtgagggggctggaggaaggataacattaggagaaatacctaacgtaggtgatgtgttgataggtgcagcaaaccaccatggcacgtgtatacctatgtaacaaacctgcacgttctgcacatgtatcccagaacttaaagtataataagtaagtaaataaataagtaaaaagaaatatgttaaaaaattatattatgtagatatttttgttatcttgcttcatgccaagtgctttcataaatgctagacttctatttgtacattttgctttcatgagggtgaagacaaataaagagtgatcattcaaaaatattaatgtacggaaaagtaaagtaactgtagggcttccataacaaaagtacaacaaattgaatggcttaaacaagagaaatgtatgtattgtctcacagttctggaggctaggagtctcaaatcaaggtgccagtagcgttgattccttttgagtaagctgagagaaagatctgtccctggcctttcttcttggcctgtagatagacaacttccttccctgtatgtctcttcacattgtcttccatctgtgcacctctctgtgttcaaataccctccaacttaaaaaaaaaaaaaaaaaaaaaaaaaaaaagcatgtcactcacattgggttagggcctaccctaatgatttcatcttaacttgattacctctgtaaagactttatctccaaaccaaatcacattctaaagtactgggggtgggtgaggatttcaatatatgaattctggggagacccaaagcaatccataaaagtagccatttaaatagaagtatttttagtcttttaacttaaagtctctctacartgttaaaccatgccatcttaatgtgtgttatttagaataatctaaaaaattatatattttcattaacatttaggttaccttcaactttgtttttgatgttttgtaagctgcccataagtgactttaatcactcactgtataccactgacagatcatttctcatgaattcagtgatgtgcactttgagactcaggaaagagggaaacttggccttactaaaatcatatagttagtatgtggcagagctgatattcaactctacatcttgctgcctccaaagttagtgatatatgcatggtcaatattattttaaaatactcatttagtgcttgcctttttaataaaatgctgattttcctgattataagtgtaacaggtgatcactgaagaaagtttaggaaaaaactcaaaacttattcagattaatattaaaattactcataatttcaccatccatagataattgttggtatattatcttacagaaatcgtttataaacatttttattattcaatttatatatttatatctgcagaactacatatgtagttttacttaccaccaaaacttgttgcaaaaaaacatttttacatttgcccagttaaaaatcaccattaatcttagtggagaattattttttaattatttaaaataagaatattttcatttttgcatttttctagagagagcatggcataagccttgtaaagttactcctgaaatttaattttcttttcttatttcctactctctagtcctaagagatgagtggttcaagacagagtgggggtaaggcaacagtcagcactttgtctttgctccactctctggttcatctctgaagcctgatttctctacccaggcatgaagatacttgaataagtagccttttccatccttttgccctgatatgaaaactggtatatctcttgagagaagagcctcaaaaaataatctgagataggaacaagtggaaagcagagatagtctcttctttttaattcacccctcctttggtcacctcctgaatataaaaagaaggacccagaacaacatggtgtccacggcaaccatatctaggtattgcagaattttagagaacccatgaaatcctttcaaaggataagcaggggatctaaatcgtgtcagatgtatagcacccagcacagagctgagggcagaatatgtgcttcatgcatcttttttgtttgatggcaatatcacttcaaggcttcttcagaaagattccatacctacctctccttctcacttctttataatctgtaatttacacacttacctcacaacttttctgggacacattcaatctatcagatatgtaaccacttgtaagctgttggtttgattctgcaagttttggtgtggtaagactggaatcgtacaaatgatatgcttggatcaggtagtccctcgtggtgagtcatgtctaggctcaccccgatgcagtccagtcatgcttcccctatgacttagttgtttgtattgtccccagagtcaagagtgtcccaagtctatgaatcttgctccagagcattgtaatttagcctacggccttgttcacacaaataaatctggcattagttccagctggcagtgatatgggcttggtgattcacttttaggcctcattggagtagagttaaagaaacttcattgtcagaaagagtgagatctctaccatgtgtcttctaagagtgttcagagtgttttttttttttagcgtgcagaagtcctaactttattcctagtaccctccattctctcttttttttattgaaacataagaattgtgcatatttacagggtacatgtgatatttttatacatgtatacaatgtgtaataatcaaatcagagtaattaggttatcagttacctcaaacatttatcctttgtttgtgctgggaacattccaaatctcttcttctagctattttgcaatataaaataaattactattgccaccttatgatactatcaaacactataacttattccttctatctaactgtatttttttacacattaaccaaattctcttcatctcctccctgcttcccttcccaatgtctggtaaccatcattctactttccaccttcatgagatccacttttttagcttccttatatgagtaagaacatgcaatatttgtctttttgtgccatcgcttaacgtaatatactctagttccatctatgttgttgcaaataacagaatttcattgcttttttatggctgaataatactatattgtgtatatatttcacattttctttttttttttttttttttttttttttgagacagagtttcgctctgtcgcccaggctggagtgcagtggcgcgatctcgactcactgcaagctccacctcccgggttcacgccattctcctgcctcagcctcccgagtagctgggactacaggcgcgcgccaccatgcccggctaatttttgtatttttagtagagacggggtttcaccgtgtcagccaggatggtctcgatctcctgacctcgtgatccgcctgtctcggcctcccaaagtgctgggattacaggcgtgagccaccgcgcccggcccacattttctttatccattcatctactgataggtatataggttgcttccatatcttggctattgtggatagtgctgtaataaacatgggagtgcagatatctttttaatacagtgatttcattttttaaaatgtattcccagcagtgagattgctgggtcatctgtagatctatttttaattttttgaggaacctccatagtgtttttcacaggagctgtactaatttacattctcactaacagtgtattagcatttctctttctctacatccttgaaagcattgtttattttttgtctttttgataattaccatttaaactggggtgggatgatatatcattgtgtttttcatttgcatttccctgataattaagtgatgttgaggtttttttaaatacactcattagccatttgtatgctttcctttgagaaatgtctattcatatccttctctgcttttcaatgggattatgtacttttttaccttgtatattctggatgttagtcccttgtcaaatgaatagtttgygaatattttctctcatttaacaggttgtctcttcactctgttgatcatttacattgttgtgctgaagctttttagcttgatgtaattccattgtctagttttgcttttgttgcttgtgtttttgaggtcttacctaaaaaatctttgcccagaccagtgttcttccaattcatgagcatgggatggatatcttttaatcttttgtgtcctcttaaattattttcaacagtgttttatagttttcattccagaggtcattcacttgtttggttaaatttattcccagatgtgtttttgtgtgtgtgtgtaagtattgtaaatgggattactttcttgatttctttttcagattgttcactrttggtatatagaaatgttactgctttttgtatgtttattttgtatattgcaactttaatgaatttgtttttcagttctaacaggttttggtygagtctttaggttttcctaaatataggatcatgtcatctgtgaacaatgatagtttgactttttcttttccaatttagatgcactttgtatcgttctcttgcctaaccgctgtgataggacttccagtgctatcttgaataacagtggtaaaagtgggcatcattgtcttgttcagatcttggaagaaagaatttccatttttccccattcagaatgatgctagctgtggatttgtcatgtaagatctttattgtttcgaggtatatttcttatgtatccagtttgttgacagttattatcatgaaggaatgtcaaattttatcaaatgctttttcagcatctattgaaatgagcatatggtttttgtccttcattctgttgatacaatgtrtcacattgattgatttacatatgttgaattatccctgcaaccctgggataaatcccacttggtcataatgaatatttttaatgttttgttgaattcagtttgcttgtattttgatgaggatttctgcatctgtgttcatcactgatactgacctgtagttttcctattttgttgtgtttttatctagttttggcatcaggataatcctggccttttaggatgagtttagaagtatagtttagaagtattcccttctcttcaatttttttgaaacagtttaaagagaattggtataggttattctttaatcgtttggcagaattcagcagtgaagctgtcagatcctgggctttcctttaataggaggctttattactactgcagtctcatactcattactggttttcaggttttctcttttttcatgggttcaatcttcatggtttgcatgtgtccagaaattyatccatttcttttaggttttcctatttgttggtgtatcaattttcataatcttgtctgttgcttttttttttgtatttctgtagtatcagttgtaatatattctttttcatctctgactttattttttagacttctggttggtgtagctaaaagtttcttgatttttttttcaaaaaaccaactacattttgttgatcttttgtatttttgtagttcaaattttatttatttatgctttgatctttattatttctttccttctactaattttgagtttgattgttcttgcttttttagttccttgaagtacaatgttaggttgtttgtttgaagtctttctactttttgatgtaggtgttgattgctacaaatttccatcctagaactgcttttggtatatcctctaggtttttgtatgctgtatttccattttcatctgtcctaagaaaattttttaaatttcctttttaatttattcattgaccaatttgtttttcagtagcatgttgttttctttccatggatttgtacagtttccaatgttccttctcttattgctttatagttttattcaattgtggtcagaaaatatacaggatatgattttgacttttttgactttttaaaacttgttttgttacctaacatatggtctatcctagagaatgttccatgtgctgttgagaaaaatgtgcattcttcagctatggggtaaaatgttctgaaaatgtctgttaggtcaatttgatctagagtaaagtttaattctgatgtttctttgttgattttcttgtctagattacctatctgctgccaaaagtggagtgttaaagtctcctactattgccttctctgttgtttttaactgtccttgacttaaggtctgttttatctgataattatagctttacttctgctctttttgtttgtttgttttccatttgcttctaatatctttttaaatatcttcacattcagtttgtgaatgtctttacagatgaagtgagtttcttgtagacagcatatagttggatccttttaaaaattcattcagccactctgtcttttaactgaagaatataattcatttatattcaaggtttgaatattattgatatgtaaggatttagtattgctatcttgttacttgttttctggttgttttgtagaatcatttctttctttttctctctctctcttactttcgtttttgtcacaaaataattttctctattaggacatgttgatttctggctacttatttttagtgtatctataataggtttttgctttgttgttactacaaggcttataaaaatatatttataacaggttattttaaactgataatagtttaactttgatgcaaataaacaaaaataaactctacattgtaataccaccccctcccacattttgacttattgctgtttcaatttacatatttttatattgcctaactcttaatcaattgttgagattatttaatagttcttccttttagctttcatacttaggatataaattgtttacttaccctaattatagtattatagaattatgcatttttctgttttttaatagtgaatttcatactttaggtttttttgttttgttttttgttttttgttttttacacattagcatccatttttttttcagattgaagaattccctgtagcattttttgtaggcgaagtgtcgtgttgtaaatttcctcagcttttgtttgtctgagaaagttttttatctctttttcctgtttaaaggatagttttcctgggtatagtattcttagctggctttttgtatttgtttccttcagcactgtgaatatagcatctcacttcttttggtctgctaagtttctcygagaaatccgctgaaagccatattagagatcagttgaatgtaatgtttcttttctcttgctgcttaaagtattctttctttgtttttgatttttactaatttcattataatatatctgggtagttttctctttgagttgaatttgtttaatatctttgagcttcctgcacttggatagtgttggttttctccagatttcagaaatttcagccgttactttttgaaatatgctttctagaccttttcctcttttacataatatctgttggaaatttctattatgtggaagttagtttgcttgatggtgtccccttattcttctttactctttttttaaattctttttccttttgcttctctgactgggtaatttcatttattcttttttcaagctcactaattctttcctctttttgatcaagtctgctattgaagctttctatggagtttttcagttcagttattatattgcttgcttctaaaatttgtttgctctcttaaaattgtttttatttttgtgaaatttcttattttgttcctggattgttttccaatttcaatctgtgttttattgtgattctttcaacttctttaagagaattattctgaattttctgcctgacattttggagatgttgcattcttctgtgtctattgttggagttttgttggtttctttgagtggtgtcatatttccctgagtttccacaatccttgtgtctttatgttgatgcttgtgtgtttgaagagtcagctacctcttccaattattgtgggggtttttttggtggtgttaggcctttattccttagtaatgaaacttcaatgttggcctgttatttcttcccattctgggagtcttatagtgtgcactggtacaaaaacactttgctggaactaacttgttgccctgccattgtttcccactctggggatgttttatagtgagcactggaagttaaaagctgtcctgaaattatattgctgccctacagttttttcccagtctggtaaagacaggtgagtaccagaactcagtcccaacttttagttgtttctgggccaggggaaagctccacctgggatttataaaaaattcagccacagatttgggcctttgcttgaatggtgcccccccttgcagcactatggcatcatccagtctcttcaacatggcacccccactgattgaagcacagagttgctgcctagatctgcatgccagtctttgagattaatgtcctgtgccttgtcttccaatcagccctctgggatacccaatggttcccatatgatgggactggagtgggcttcccatgaagattcccagactgatggggagattgaacatttctcctgctctcttgagttgtcaaccatgtgtttgcatttaggcagcagatggaattattgcaaatcatttactttataaccatttgtccccttatactatcttacaatctacttttcatataattgtgatgagttttctgctgttatggaaaattccatttatggctaaagcttttagtaaatgctatgaagcttgatgactctctctactgaatgggaataattatgcattagttcataaaatgttcttatgagtttgtttagtcactagaaaggctagaatactgatgcttaaatataaaaaatatatagtttaaagagctataatatctagcagttcttttgtttctaaagctccctggacattgagtaacaaataagttaataaagcaatagtttgttatttgattttatatcagaaagcctaaatagtattttaaaaataaagcttccatatattcaatcttattggaaaaagtatttgaaaagctcaacctcagcttcccctgttgttttatctagaatatttaagactttcttaacataaatcatcaaaaatatgtattttttctagttgagatttaactagattaattcagtgtgtggtatttttggctatcataataaaggtattgcatttccaaactgcagaatatttgcactgagtaaaatagatgccatttttttactaagtaattaaaacattgtcagaggatatgcttttaaaaattatcacaatagctgtaaagtcaattgtgttaatattggcaatctgtcccttctatttagaattttgtgccttagtctctgataattgcatcatttacaaatcccctctttacataaacatggcctttcacctaaccctctaaattaatcagccctcttttgattacaagtgacagaaactcaaatcaaaatagcataagcaatttaaataataacaacaataaatgatgaaagtttattagttatcttagctggaaggatttttaaagatgtagaaataaaatgagtaactgtagagtcagtgcctcagagactcacctcgtcatgagtaggactttttccctccatcactttcttacctcttcttagctacatctacatgaaggcattctccacttggaaaaaaagacggaggcacaacctcccatagaaaagagtttctttctcccattatcaatatatctgcttggattctgcttggctatttgcttggattaaatgtttactttttagatacattactgctaatagagaatgagaaaataagactggctatgcctggaggttaggaagtgaggaacaagagaggggcttcgcaagaatcatgtggaatgattgtgtgatgctttctgaaaggacatgagtctaggcagtcaaaaatacctggctaaacaccctaaggctatattccctctatatattccctattccctatattccctcccttacccaaactacccagcatctgctattcccgaactcttttcccctctcatttttttgcatttctattggaagattaacctgtgaataatcttttcaggttcctacctttaaaaatacaggacaaagacaactgcttcattatactcttatctcagtggagtaaagaaagtatctagagttctgtctctttttcaaagtagattattactcttaggaaaaataaaatgggcaaatcagagtttatattcaaaatatctcgtaacacctaaataaggcatggacgctgaacaatcagaattggtctttgtgtagacattgcatcctggaggcccgtattatatcaatcaggcttaaatttcctcattgctggatcattacatggtcctacttatctggctgatggggcaggttaacagttgagggctaggggagttcaaagtagtaattatttatccaccaggacagaaactatgtaatattttggtaataatacatgactgctgactaaccaaggcgggtcactatgtaggggtgcaggattaacagttacttaatagaattagccctgcagtgacaaactttaagagagttacgtgtttggaacattgatttaaaatgttcttttaagtagttgctttgtagcttgcttgttttgttttctttttcccaaatgtacttcaaatgggtcactgaatatcttcaaattgtatgtaaattttggaggggaagtggtatatgcagatttttttttttctggaaagaagaccaatcacttttgccaaattctcaaacaggcccatatttctctcacacacatgcgtgcgcatgcgcacacgcgcgcgcgcacgcacacacacacgttaagatgcgaagaatcactgtcataaaatgtcatatttctaatttctgtaaatggggagaattcctcaagcttatataaaagtgatgtaaataattcagttacaattataaaagaaatggtatcacagcaaatccctttggcaccccactgaaaatttctctctgatgtttaaaacaccatttctatgcttactcttacagctgtattaataatcagataaggggtttatttcttgtctattttgcttagcatattaccaaatctggttcatatgaactcatgggtaaaatctaaaaatgttcatgaattattcttcatgaatttttcacaaagcaataatgtatgaaaaagtgaacaatataacatcagccagagacgcctcagttcgcaatttacaatgaagaaaactggcatatactttagagggaatttctaataagccaaaaggttaaaagctaaatggggtcaagagctgtcaccttgacaaatggtaaagtctaacctttggctcccaccaggccagaccataaccgtagagttactaaagaaagcaactgtcaaggaacaagcccattattaagactgttacttaaagttctaagggaacttccttaaaccgttctatgtgtactttatttatcttgaaactttttgggaacagctgtataacaggaagtagtatttctgaggcccaggaagtgagtaagggctacacaaattggggctaatgactctattttgaaaaacaaacaaacaaacaaaaaaactaaaaaacttctcaggtgttttatgatgaaagtctacttctctatcttccatactgtttgccatcttccttgatgattacatctgatgaccaagctcaggctttcccatacaaatttattttgccaagtttgctttgaaagaatattagattttgtagagttttacattattaaaatcgtgagtggcttcttttgcttttcactgttgagtgtttttgctacagcctaacctatctttttcttattgcttgttttctttgtatttgctactcaatatagcttgtcaaatgtgtaattcatgtcatatacagtgctgtctaatataattcatgggtataaagtgagagagaaatgtaattctaaagttacttgaggtggaccactaaaaggtcctgagttcatttatttattcagcaaatatatattgtccaattgcaagctaggcatcaagtatattcaaggtggtaaataaaatgagcctgatcacttcttttagggcatttacagtgaagtggaggggacggacatgactcaatcaggtgaacacatcagccatataattacaaatgaacatgagagctgcaaaataaatagacgagagagctttgaaaaagagtaataaagggggctacctcagatggagggaggagaggttttatagcaaacttctctgagaagaaaatattttagctatgacctgagaaatcagaaggtgtcagtcaaggtgggagaaagaaaatttaagtagagcgagcagcatgcccaaaggtcacatgaggaactgaggaactgatgggaggccagcatggcaagaatgagtaggagagagaatggcacaaaatgaagaacaagagggcagtgtggcagcactactgctgatacccagatatgtgacattccacctcattccagacacaaagtagaattgcacttcctggctcccttgtgtttgggtggggccctgctactagatctagccagtgagttgtgagcacaaatgatgcctgtaactttctggtcaatttctgaaactaaagtatgtaatggatcagatcacctctgcactagagtagtcattcagtaagacaaggaggaaaaatggtgctgggccctatgtgaggagactatagtgtcctagtcagtttgggttgctgtaataaattactatagattaggtggcttaagcaacaaacatttatctcagttttggaggctgggaaatccaagattaaggtgctggcagattcaatgtctagtgagggcactcctcttggtttgcaggtgggtgtcttcttgttatatccttacatcgtggataacagagagaggaagcaggatttcttatttcttcttataagggtattaatcccatttattaggactctgccttcattacctaattacctcccaaaggccctacctcctaatgtcatcacactagaggttagaatttcaacatataaattttggggggcagaaaaacattcattccctaacatagagggtgaggaagatgagaggaaatgtccctttcagagactgaattgggaagtaaaccactttgtgtaatattgcagtaggtactgctatagtgaggaatggagagtggatggggagaactctcctttggtaagaagaaggaagaaaaagatgtaaagtagtgcctatgatcctgatgaatttactttactcaaactttcattaacctctacaaacaaaaaagaacctgagaagacttttgttagtcactttcctgtgcattgaggaattgtccagagggactagggaagcccatcagactaatggcagacctcttagcagaaactccacaagccagaagagattgaggaccaatactcaacattcttaaaagaattttcaagcagagaaaactcaggattaagaaactcactcaaaatccacacaatttcatggaaattgaacaacctgctcctgaatgactcctggttcaataatgaaattaaggcagaaatccagaagttctttgaaaccaatgagaacaaagagacaacataccagaatctctgggacacagttaaagcagtattaagagggaaatttatagcactaaatgcccacataagaaagctggaaatatctcaaatcgacaccctaatatcacaattaaaaagagctagagaggcaagagcaaactaatccaaaagctagccgaaaacaagaaataactaagatcagagaagaattgaaggagatagagacatgaaaaactctccaaaaaaatcaacaaatccaggagctgttttttttttttgaaaaaactaacaaaatagatagaccactagctagattaataaagaagaagagagagaagaatcaaatagatgcaataaaaaatgataaaagggatatatatcatcactaatcccacagaaatacaaactaccatcagagaatactataaacacttctatgcaaatacactagaaaatctagaagaaatggataaactcctgaacacatacaccctaccaagacaaaaccaggaagaagtcaaattcctgaataggccaatagcagtctctaaaatggaggcagtaattaatggcctaccaaccaaaaaaatcctaggaccagactgattcccagctgaattctaccagaaatacaaagaggaactggtaccattccttctgaagctattccaaacaattgaaaaggagggactcctccctaactcattttatgaagccagcatcatcctgataccaaaactggtaagagacacaacaaaaaaggaaaacttcaggccaatatccctgatgaacatccatgcgaaaatcctcataaaatactggcaaaccaaatccagcagtgtatcawaaaacttattcatcatgatcaagccagcttcatccctgagttgcaaggctggttcaacatatgaaaatcaatacatgtaatccatgacataaacacaaccaaagacaagaaccacatgattatctcaatagatgcagaaaaggctttaataaaattcaacatcccttcatgttaaaaactcacaataaactaggtattgatggaacatttctcaaaataatgagagttaattatgataaacccacagccaatgtcatattgaatgggcaaaacctggaagcattccatttgaaaactggtacaagacaaggatgccctctctcaccactcctattctacattgtattggaagttctgaccagggcaatcaggcaagagaaagaaagaaagggtgatcaaataggaagagagaaagtcaaattgtctctgtttgtagacaacatgattttatatttagcaaacaccatcatctcagccccaaaatttcttaactgataagcagtttcagcaaagtctcaagatacagaatcaatgtacaaaaatcacaagcattcttttacagcaataataggaaagcaaagcagaaagccaaatcatgaatgaactcccattcataatcactacaargagagtaaaatacctaggaatagagctaacaagggatgtgaaggacctcttcaaggagaactataagccactgctcaaggaaataagagaggacacaaacaaatggaaaaacatttcatcctcatggataggaagaattgatgtcatgaaaatgaccatactgcccaaagtaatttataaattcagagctatgcccatcaaactatcattgacattcttcacagaattagaaaagactattttaagtttcatatggattcaaataagactttggatggccaaaacaatcccaagcaaaaaaagcaaagctggaggcagcaggctacctgacttcaaactatactgcaaggctacagtaaccaaaacagcatggtgctggtactgaaacagacaaatagaccaatggagcagaacagagatctcagaaataacactacacatctacaaccatttgatctttgacaaacctgacaaaaacaagcagtggagaaaagatctcttattcagtaaatggtggtgggagaactggctagccaaatgcagaaaacagaaactggaccccttctttataccttatacaaaatttaactcaagatggattaaagacttaaatgtaaaacccaaaacaataaaaacagtagaagaaaacctaggcaatactattcaggacataggcctgggcaaagacttcatgacaaaaacaccaaaggcaattgcaacaaaagccaaaattgacaaataggatctaattaaactaaagagcttctgcacagcaaaagaagctgtcatcagagtgaacctacagaatgggagaaaatttttcctatctgcctatctgacaaaggtctaatgcccagaatttacaagtaacttaaacatatttataagaaaaaaacaactccatcaaaaagtaggcaaaggatatgaacagacacttctcaaaagaagatatttacatggccagcaaacatatgaaaaaagctcaatgtcatggatcatcagagaaatgcaaatcaaaaccactatgagataccatctcatgccaatcagaacgacaattattaaaaagtcaggaaatgacagatgctggcaaggttgtggagaaataggaatgcttttacattgttggtggaaatgtaaattagttcaaccattgtggaagacagtatggcaattcctcaaggatctagaaccagaaatactatttgacccagcaatcccattacttagtacatacccaagggaatataaataattctactacaaagatacatgcacttgtatgtttattgcagcactatttacaatagcaaagacatggaaccaaaccaaatgcccatcaatgatagactggttaaagaaaatgtagtacatatacaccatagaatactatgcagccattaaaaggaatgagaccatatcctttgcaggaacatggatgaagctggaagccatcatcctcagaaactaacactggaacagaaaactgaacaccacttattctcacccataagtgggggttgaacattgagaacacatggacacagagagggaacaacacacaccagggcctgttctggggaggggattgagtggagggaacttagaggatggtcaataggtgcagaaaaccaccatagcacacatatacctatgtaacaaacctgtatgttctgagcatatatcccgttttttttacaagaaataaaaataaagaaaaaaaagaaaatctcttgcaaccaatgaaaatgaaaacaaaatataccaaaacatatgggatacaactaaagcattgctaagagggaatttcatagtgataaatacctatattagaaaagaagagaggattttaatttagcagactcacctagagagcacaactctgattttgttgagaaagcctatctccacagaacctaaaacacacaaactttcaaggtaggggagattggaatccaagaagaatgcaaaaacattttgcaagctggtaagtctctggactggagaatatctggatcaggaaggaggcaagatggtcgactagatgcagccagaaggaacatctcccaccaaaggactgggacatcagaaagactggcacactcctagcagatcttcacagggaaggcactgagggcagatagagggaagacacagatgctgggctgcagagggaggaagctgggaaccctgagcaatgctagtgcacaccaggaccggttcctggtccccaagaactcctggggatggggtgaattgaacaggccaggagcgatccactctcgcatggatctctggaatcctggcatggggaaatcctttaaccaccatggacatttgaattggcagagagagctgcttagagaagtggaagggacagaagtccagccagtgcagagcccaaagggtttggagtgggagcacctatagtggagcatggccagggacacccatctccctaagctagacttgtttccataggagactgtagccctaggggaactgtcacctgaactctgcagggaggtcytgcccatgaaatggcagtccaccttgagtacccccttggtctgctggcctctccaggggccccagcctggctgcaggtgcttgcagtgcagtccccaggtagctcgtgggggcctgcattacagctcctgttctagtgggtcaggcctgactggcagagtgctccagcatagcagtccctgcagacaccagcatgcttgtggcctcccacaactgcagcgtcccccatgctacttggccttcacatactcaccaatggccacccccacattgctttgccaccatgtatttgcatgggcagactttgccttccttaccccaccaggatatgtgcatgcatgcatcctaccataccgctgctgcctgcatgagtgcaccttgttgccaacaccccactaaaccaccattgttgttagagcactgggtggcacagagcccaccagccctgcctttgccagcattctgctctggcaccaacacttccagcaatgtgaaactggacacagagaacagcagagtcacccctgccttgagcagccaccactgcctgcatgaaaacacacagagggtccacagtcttgtgtccatcagcacttcaaccccatgctaataccaccaccagcacgaatgcacacacagtcactggtgggggtccccgcccccaagccatgtcgccatgtggccaccactgctgctgtgaatgcccacacagaggccagaaccccagcacctgctagcacactgccacatccaacaagcatgcaccctgctgtgttgccactgtcactgctgctggcacatgcaaatgagaacagattctgctgcctctgccctatgaagctctttgtctggcactacccatcagagtgttgtgaccaacagtccagaagtaactcagcccctccagtgcagcaggttcctaaccttgaggagccagaaaacaaagttgggaactgataccagtcccccagggttagagcacacagtccacgagtcctgagttgagtcttggtcccctaaaatcttccagaaattgagccagtcaactgaacccaccttataccaccatgaaacacccaaggtcatgaaatagaacaaaagaaaaaaatccaaaggacagtaatttcaaagattggaggaacaggccaggcgtggtggctcacacctgtaatcccagcactttgggaggccgaggtgggtggatcacgaggtcaagatatcaagaccaccctggccaacatggtgaaaccccatctctactaaaaatacagaaaactagccgggcatggcagtgggcgcctgtagtcccagctactcgggaggctgaggcaggagaatggcgtgaacacgggagacggagcttgcagtgagccgagactgcaccactgcactccagactgggcaacagagcgagactccatctcaaaaaaaaaaaattcgaaaaagattggaggaacatcagaccacaaagatgagaaaaaaccagtgtaggaactctaagaactcaaaaagcctgagtgtcttctttcctccaaatgatcatactagttctccagtaagagttcttaactgggctgaggtggctgatatgacagaaataaaattcaaaatatatatagaaatgaagatcatcaagattcagaagaatgttgaaaccaatctgaggaagctaggaatcacaataaaatagtacagaagctgacaaacaaaacactcagtatagaaaagagtgtaaccaacctgatagagctgaaaaaacacagtacaaaaatttcataatttaattgtaagtattaacagcagaatagaccaacctgaggaaagaatcttagagcttgaagactggctttctgaaataaaatagtcagacaagaataaagaaaaaataataaaaaggaacaaacaaaacctccaagaaataagatattatgtaaagagaccaaatctatgactcattggcatccctgaaagagatggagagaatggaagaaacttggaaaacatatttcagaatatcatccatgagaacttccccaacctagctagtgaggccagcatttaaattcagaaatgcagagaacccccataagagacttcacaagaagatcatccccaagacagacaatcatcagattctccaaggttgaaatgatagaaaaaatgttaaaggtagctatagagaaaggacaggccacctacaaagggaagtccttctgacacagcagacctctcagcggaaactctaccagccagagagattgggggactatattaaacattcttcaaaaaaagatattccaactgagaatttgatatctgcccaaactaagtgtcataagcaaagaagaaataagatccttttcagacaaacaaatgctgagggaattccttatcatagacctgccttacaagaacccctgaaagaagcactaaatatgaaaaggaaagaccgttatcagacactgcaaatacacagtgtctctataagtacacagaccagtgactctataaagcaaccacacaaacaagtctgcatagtaaccacctaacaacatgatgacaggatcaaacccatacaaattaataccaaccttcaaggtaaatgtcctaaatgctcccaattaaaaggcacagagtggcaagctaaataaagaagaatgacccaatggtatgctgtcttcaagagacccatctcatatgcggtgacacccataggctcaaaataaagagatgcagaaaaatctaccaaaaaatgcaaaacagaaaaaaacaggggttgcaatcctaatttcagacaaaacagactttaaactaacgaagctcaaaaaagatgaagaaggatattatgtaatggtaaaggttttaattcaacaagaaaagctgactatcctaaataggtacatacccaacagaggagcacccagatttataaagcaagtttttagagatcttcaaagagaattggacttccacacagtaatagtgggagacttcaacaccccactgacagtattagatcattgaggcagaaaattcacaaagatattcaggacttgaactcaacactggaccaaatggacctaatagacatctacatatctctccacccaaaaacaacagaatatgtattcttctcatcaccaaatggcacacactctagagttgatcacataatcagactttagacaatcctaagcaaaagaaacaaagtcatattgaaccacagtgcaataaaattagaaatcaagactaagaaaattgctcagaaccatacagttacatggaaactaaacaacccacttttgaatgccttttaggtaaataatgaaattaaagcagaaatcaagaagttcccagaaactaatgagaacaaagataaaatataccagaatctctgggacacagctaaggcaatgttaaccaggaaatttatagcactaaatgctcacatcaaaaagttagaaagatttaaaataaacaacctaacatcacaactaaatgaactagagaagcaagagtaaaccaaccccaaaactatcagaagacagtaaataaccagaatcagagctgaattgaaggaaattgagacatgaaaagccattcaaaagatcaatgtatccaggggctgtgtttttgaaaaattaataagacagatggactgctagctagactaataaagaagaagagagaagatccaaataaacacaattttaaaaataagatagtaattaccactgaccccagaaaaatacaaataaccatcagagactactatgatggtttgtgtactatgcacacaaactagaaaatctagaaaaattgataaatccctggacatatacactctctcagactgaaccaggaagaaattgaatccctaagcagaccaataacgaactgtgaaattggatcagtaaatttatcagtaaatagcctaccaaacaaaagaagtccaggaccattcatatcacagccaaattctagtagatatacaaagaagagctggaatcattcttattgaaactattccaaaaaattaaggaggagggactcctccccagcacattctatgaggccagcatcatcctgatttaaaaaaaaaaaaaacacctggcaaacacatagaaaataaaacttcaggctagcattcttgatgaacatgcatacaataatcttcaacaaaatattagcaaaatgaatccaggagcacatcgaaaaactaatccaccacaataaattggctttacccatgggaggcaaggttggttcaacatacacaaatcaataaatgtgattcatcacataaacaggaccaatgcaaaacccacatgattattgtaatagatgcacaaaggcttttgataaaattcatcacctcttcatgttaaaaaccctcaaccacctaggtactgaaggaacgtacctcagaaaaataagagttatctatgacaaatccacagccaacatcatactgaatgggcaaaagcttgaagcattccacttgaaaaccagcacaagacaaagacgccctttctcaccactcctattcaacatagtattttaagtcctggccagagctatcaggcaagagaaagaaataaacagcaaggcaataccaaacagccaaggcaatactaagcaaggagaacaaaaaagaacaaatctggaggcatcacactacctgatttcaaactattctacagggatacggtatccaaaacagcatgattctggtataaaaacagaaacatgaccagtgaaacagaatagagagccctgaaataaggctgcacacctacaaccatctgatcttagacaaagcaaaggggaaaggactccctattcaataaatgatgctgagaaaactggctagcgatatgcaggagattgaaactggacccattcagtacactatacataaaaattaactcaagatgggttagagacttaaacgtaaaactcaaagctataaaagctctggaagacaacctaagcaataccattccagacataggaactggcaaagattttatgatgtagatacctaaagcaattgcaacaaaagcaaaaaaatgataaatgggatctaattaaatacagagcttcctcacagcaaaagaaactaccaacagagaaaatagacaacctacagaatgggagaaaatatttgcaaactatgcatctgacaaagttcttatatccagcatctataaggaacttaaatttataagaattaaacaaccccattaaaaagtgggcaaaggacgtgaacagacactttgcaaaaaaagtacgtgcagctaacaagcatatgaaaaaaactcagtatcactgatcattagagcaatgcaagtcaaaaccacgagatgccatctcacatcagtcagaatggctattattaaaaagtcagaaaataacagatactggtgagcttgtggagaaaaggaaatatttatacactgttggtgggaatgtaaattagttaaactattgtagaaagtagtgtggcaattcctcaaagagctaaaaacagaactacctgtcaacccagcagtcccattactggatgtatacgcaagggaatagaaactgtttcatcataaagacacatgctcacatatgttcactgcagtactattcacaacagcaaagacatggaatcaatctaaatgcctatcaatggtaaactgagtaaataaattgtggcacatatactccatggcatactatgcagccataaaaaggaatgagatcgtgtcctttgcgggaacatggatagagctggaggctgttatctttagcaaactaatgcaggaacagaaaatgaaatactgcattttctaacttataagtgggagctaaatgatgagaagacatggacacaaagatggaaactaggcttagcaactgggtgacaaaataatctgtacaacaaactcccatgacacaagcttacttatataacaaacttgcacatgtatctctgaacctaaaataaatgtctttttaatatctggatccaaattgttttactggccaatggaaaaagattttttgcccagatggctaaatcttttgaataatatttgtgaaaaagacttttaagatttttgaataatatttgtgaaaaagacttttaataatattagtgaaaaagacttccttacagaaggcaaattaagtcttaatttaatttggcagcttttaatgtggcaatctttgattctttattcttttagatggctgtgtgcaccaattaaagaatgcatcccatttgctaaagaaattaaaatttaaaagaaaaaaatcttaaacaatttaatactacatctcaaggaagtagaacaataacaacagactaaggccaaattaggcagaaagagggaattaacaaagatttgagcagaaatacatgaaacggaaaattcaaaaataatagaaaaaaataagacaactaggaattggttttactggttttttataaatataaactaaattggtaaaaccttaagtaaactaactagcaaaaaaagagcgatgcctcaaataaaaaaatcagaaatgaaagaagagaaatcacaaatgatgccacaaaataagaaagaatcaaaagagataactatgaacaattatgtgccaacaaactggataagctagaagaaatgaataaattcctagaaacatacaatcaaccgagactggattctgaggaagcagaaagtccgaacagacctataactagtatagatattgaaatagttattacaaagctcccaggaaggaaaagcccagtaccaggtggcttcactggtgaaattctaacaaacgtttaaagaaaaatttataccatttcttctaaaacttttcaaaaaaattgaaggggagagggaacatgtccaaattcattactctgatactaaagtcagacaaaagcaccacaagaaaacaaaactataggccaatatccctgaagaatgaacatacaaattcctcaactaaaccccagcaaactgaatccaagagcacattaaggggattatacaccatgaccaaatgggatttgtacttgggatgttagaatggttcagtgtgtaaaaattaacgtgaaattccacattaacaaaataaagcataaaaacatgtgatcatctcaagatacagaaaaagggtttgacaaaatttaacatcttttaattaaaaactcaaactagtaatagattatgtcaaatacaaatacaaatattatatacctcaacataataaaagccatatattaaatgcccatcactaacgtcatactcaatggtgaaaaaccgaatgaaggcttttcctctaagattagaaacaagacaaggatgcccactttcactgcttctattcagcaggatacttgaagccctatctagagcaattgggtaagaaaaaaagtaaaaaggcatttaaattgggaaggaagaaataaaattttccctgtttgcaggtaacatgatcctatatatagagaaaactctgaagattcaattaagaaactgttagaactaacaaatgaatttagtgaaattacagagtacaaaatcaacataccagaatcagttgcatttctatacactaacaacaaactatctgaaaggaaattaagaaaacaatgcccatctaaactagtgccaaaaagaataaaataatttagtaatacacctaaacctaactaacaaggtgaaagatttgtgtattaaaaactacaaaacattgatgaaagatactaagcaaatcaaaagacattgaatgttcatgaactagaagacttaacattgttaaaatatccatactaccaaaagaaatctacagattcaatgcaatccctatccaaatctcaatgtcattttttacagaaagtgaaaaaaagctctaaaatttatatggagccatgagtcaagaaataaccaaatcaatcttgaaaaaaagaataaagctagagacatcacatttcctgatctctagatatgttacaaaaccacagagatcaaaacaatatgatactggcattaaaacagacatatagaccaatggaacataagagaatccagaaataaatctatgcatacttggttgttttattctattcgggctactataataaaataccataaactgggtagcttataacaacagaaatatatttctcacagttccagaagtttggaattccaaaattgaggcacaggtactgatggactgcttcctcatagttagtgccttctcactgtgtctcacatggtggaaaggtgaagcattcctctcagatgtcttttattcatgaagtctccacttttatgacctaatcatctctgtaagtccccgtctcctaatgccattcaacatatagatttagggagacaaagattcaacatatggattttgggtgacaccaacattcagtctatagcaacagtcaactgacgtttgataaaggtgtcaagaatacacatagagattggagagtctcttcaacaaatggtacttggaaaactggatatccatattaaggaatgaaactggatgcttgtcttacatcatatgcaaaaatcaacttgaagtggcttaaagattaaacatagaccaagactataaaactactagaagaaaaccttcatgacattggtcttggcaatggtttcatggatatgacatcaaaagcacaggcaacaaaaacaaaagtaaacaaataagaatacatcaaactaaaaagcttgtgggtgaattgtttgagctcaggagttcgaggccagcctgggcaacatagtgaaaccttgtctctacaaaaaattaaagaaaaaattagctggatatggtaggctcacacctgtagtaccagccacttgggaggctgaggtaggaggattgcttgcacctgggaggtgccagaggttgcagtgagctgaaattgggccactgtactccagcctgagtgacagatccagaccctattgcaaataatagtaataataataattaataaaataatgatatgaatcaacagagtgaaaaggacacttacagaatggggggaatatttgcaaaccgtatatctgataaagggttagtatccaaaatatctaaaataaaccccttcaggttattagttaaaataaaagagagagaaaaataaataaataaataaataacctgatttaaacatgggctatggacttggatagacatttcttcaaagaagacatacaaatggccaacagatattttaagaaatactcagtgtcactaatcatccaggaaatgtgaattaaaactataatgaaatatcacttaacacctactatagtagaatggctactgttaaaaaaaacagaaaatagcaagtgttgacgaggatgtacagaaattggaacccttgcacactgttggtggaaatgcaatatggtgcagcttttgtgggaaacaaatgaagttcctctaaacatttaaaaatgcaattacatgatccagcaatcccactttggggtgtttattcaaaagaattgaaatcaggatctcaaagatgtattagcactcctatattcattgtaggattattcacaatagttaagatttagaaacaacttaagtgtctattgacagatgaatagatgagaaaatatggtatataaatagtggactattattcagccttaaaaaagcaggaactattgccgtatgtgacaacaacatggatgaaacttaaagacattgtgctaagtgaaatacatgagtcatagaaagacacatattgcatgattccacttatatgagttatctaaaatagtcaaattcatagaatcaaagagttggattgtggttaccagtgggtggaggtagagagaaggtagagagaaatggggagttactaaacaatgggcgtaaagtttcagtcaagaaagatgaataagttctagggatctgttatacaacattgtacctatagtcaacaataatgtattgtacacatatgcatttgttaagaaagtagttttgtgtttaatgtttttagcacaattttttaaaataaaaagacagtggtattctaattttcctttcttttcttaaactcaattagaatttctaaatttggggcatgttcttacatttataggtaacagttcatttattattttgagacatagagcaatttataaggaaattaaagggaaactccctttaattcatcttccttcctgatattcaagaacatagactgagctttcctctatctctttcagttctagtttatatttgcaaaggtgtgtctgggccagtccaatctttcttcctactgttctcatctaccatatcaatttacattacagatcacatgccgaactttaggggagaggacaaattactgggattaacaatgaaagatatagaactgctcaggatattttctaggtttaggagacttgaggaaaatgaataagtgaaatgtagacatatatgaatgaatatatcaaacatcagaggagaaaatttagctgtgtccagagaggacagagatgctatctttctattgcttgtttttgaactttctttcgtattttattattgtattgttaataatcattgaagtagtgtgagaaatttcagagaagtagaagtagagcagtttctctgaaaaacttatagatggtgacagatgaccacataattgtgtgacagtaaaatgctgtattgagcttcctgctgtattatagaaagaacatatgaatagataaaagcacaacagttttccttttcactatgtctcaggagaaaacaatgcacatcggcatatatggaaacaaatgagattagttaaaagaaggaatttaaattatgtagactaagccagggtaatgcttacgaatgagatgactcatctaataaaagcatcaaagagaaaaactgttgtttcagttcagattttcttggtcgttttcctgagatgatgatgatgatgatgatgatgatgatgatgatgatgataatttgctttaggaaggagctgcacactacaaaatgcaacagagttgataatgataagattagttgaattaagtaattctagaccccaaattgattatttcatttcactttctaggtcaatagtgtaccttgttgcaatgaactgagttggttgtaaaaagtctactatcttatcaaaagattgttcaaaaacatctccatgtactaaatactatcaagcaaaaatatattgtgtatagggaaatacagtatttaaaaaaattggtagaatctacaatgaactcaaacaaatttacaagaaaaaaacaaacaaccccatcaaaaagtgggcgaaggatatgaacagacacttctcaaaagaagacatttatgcagccaaaaaacacatgaaaaaatgctcatcatcactggccgtcagagaaatgcaaatcaaaaccacaatgagataccatctcacaccagttagaatggcgatcattaaaaagtcaggaaacaacaggtgctggagaggatgtggagaaataggaacacttttacactgttggtgggactataaactagttcaaccattgtggaagtcagtgtggtgattcctcagggatctagaactagaaataccatttgaccctgccatcccattactgggtatatacccaaaggattataaatcatgctgctataaagacacacgcacacgtatgtttatagctgcactattcacaatagcaaagacttggaaccaatgtaaatgtccaacaacgatagactggattaagaaaatgtggcacatatacaccatggaatactacgcagccataaaacatgatgagttcatgtcctttgtagggacatggatgaaacgaaaccatcattctgagcaagctatcgcaaggacaaaaaaccaaacacgcatattctcactcataggtgggaattgaacaatgagaacacatggacacaggaaggggaacatcacactctgggtactgttgtggggtcgggggagcggggagggatagcattaggagatatacctaatgctaaatgatgagttaatgggtacagcataccagcatggcacatgtatacatatgtaactaacctgcacattgtacacatgtaccctaaaacttagagtataataataataatgataataaattggtaactagtttaaggtcatgtaacctactcacacaaataatcacaataagatgtaatatagaatgtgcatgtaaaacataaattttatacataaaataaataatagatcatagccctgatgcatgcgtgcacaaacacacacacacacacacacacacgacacacacacttgcactatatttgcaatagcctagctactaaggaatctgattaaacatagattctatcttgcatatccgatttcttaatagcagaattaagagcttcttggaagaaaaggcttatactcaaaatctgcttttctgaatccttttgagttgagcacaaaaggaaaccaaaaagacccaagaatagcaatgcaatgtgtgtattgaaggtttgttaggaattattcactattgtatttcttttctgtcctacattacagcataggctttgcctagaggcaaaagaattaagaattacttgcagttcctactcttttgcagtcaaggcagtaatagggtgatggataaggtgtatagaacagcagttctcaccaaatgcccttgaaaaatcaagcaaatagatggcttcacatttcattatctaaccccgatatggcctgacatttatactgggagcagagatgccaatataactgaagggttttgaaatggccctttgaggaaaggtgatgaggtatccattgatttaatctaagaggagatggagaaataatacaagagggacttgatttcacatgcaacttgtttaggagaccgcatctcaacagtttttgaatggcatatttctagctgttcatgtggctttatgctgatagtgtcagtcaaatgaacaagcttgaagtttttaatcagaaaatattacattttataagtggaagggtgcaaaataagaagattgcaaagtagcgctgcctgcacctatcattaatgctgtgtggatttttttctaattgaaaacagcacaacgagagctctgagtatgagatgtagttatacaaaaaggcataagatgctagacaccttcaaatactgggtgttctccttactagccatatgaccttaagcaatgtatttaacctattctttgttctcattttcctcattcataaaatatgcacaataaaacttaccttatagttttgtttcaaatataaaatgaataaatattgttaaattatttcgagcattctttggtacacagtaaaccctccgtaagtattaacttttatggataaaaacttttaaaaaatggaaatagatttattatttttatctgattatgaaaattatatgtgattattatttaaaagattttaaagaaagatgcaaagagaaaaaattacttaaaatcaatttgtcctcagataactatagtgaacatttaggtatcatagttccaggaagacttttgtgttcaaaagatgcataatgtatacaattgtgtcatgggcacatctcctcgggccaatctatggctgacccctactccatcctacccctaaagtaaacatgcattttgacctgtatcactgtcatctgtcaaaatccatgctcctcaaaggcagtatcttctgtaaaccctcaatctttttattactatctagattctcaggcttaattgttccaaattatgccagccatcacctccatgcaaatctcacttacctacctctttatccatcaaaaataatctattaaaatcagttatacttacttatttagcacttaaatattttagactttgtgctaagtgcctcacatatagcatttttactcttccagatagctttcaagggagctttcataacaaccattttagcattgtttcgatctcattctcaatctccatctctttcaaactataaactaaatttctcccttggcaaggttggcctacacccaggaacaagcaaggaaagccaccctctgaggctagaagcaagatggagtcagccatgctagccttctctcattgttataatctttgcaaagctggtttcatattttactaatctttctctgttaaatggacaaacatccttcttgatgctacttcacacaccttttccaacctctctgtacttgacacaattagacaaagcatttgctcaataaatatttataaagttaagaaagaatcactttatacctaagagtggatcctaatgtttacataaatatattcctgtattgaggttcttcctttctccccaattaccaaattctttctttctttttctttctctttttctttctttctttccttctttctttctttctttctttctttctttctttctttctttctttctttcttctttctttctttctttctttcttctttaagttttgggatacatatacagaacatgcaggtttcttacacagtatatgtgtgtcacgatgatttgctgcacctatcaacccatcacctgggttttaagccctgcatgcattagctatttgtcttgatgctctccctcccctcgtgcccccatgacccaacaggccctggtgtgtgttgttcccctccctgtgtccatgtgttcccattgttcaactcccacttatgagtaagatggatttctgtttgcttttctgatcctgtgttagtttgctgtgaatgatggcttccagcttcatccatgtccctgcaaaggacatgaactcattcctatttgtggctgtatagtattctatggtgtatatgtaccacattttctttatccagtctatcattgatgggcatttgggttggttctatgtctttgctattgtaaataatgctgcaataaacatacatatgcacgtgtctttataatagaattatttatattcctctaggtatttacccagtaatgggattgctgggtcaaatggtatttctggttctagatccttgaggagttgccacactgtcttccacaatggttgaactaatttacattcccaccaacaatgaaaaagtgttcctctttctccacagcctctctagcatctgttgtttcatgacttctttttaataagcgccattctgactggtgtgagatggtatctcattgtggttttgatttgcatttctttaatgatcagtgatgttgtgcttttttttcatatgtttgttgcccacatgaatgtcttcttttgagaagtgtctgttcatgtttttgcccactttttaatgggttttcttgtgtttttcttgtaaatatggttaagttccttgtaaattatggatggtagccctttgtcagatgggtagattgcaaaaatgttctcccattctgtagattgcctgttcactctgatgacagtttcttttgctgtgcagaagctctttaattagatcccatttgtcaattttagcttttgttgtgattgcttttggtgattccatcataaaatctttgcccatgcctatgtcgtgaatgggattgcctaggttttcttccagggtttttatggttttgggttttacatttaagtctttaatccatcttgagttgatttttgtataaggtgtaaggaaggggtccactttcagtcttctgcatatagctagccagttttcccagcatcatttattaaacagggaatcctttccccattgcttgtttttgtcaagtttgttgaagatcagatggtcttatatctgaggtctctattctgttccactggtatatgtgtctgttttgatacctgtaccatgttttggttactgtagccttgcagtatagtttgaagtcaggtagtgtgatgcctccagctttattctttttgcttagaattgttttggctatacgggctcttttatggctccatatgaattttagagtagtttttttctaattctgtgaagaaagtcaatggtagtttgatgagaatagcacttaatctataaactactttgggctgtatggccattttcatgatattgattcttcctatccatgagcatgggatgtttttccatttgtttgtgtcctctcttatttccttgagcagtggtttgtagttctccttgaagaggtccttcatgtcccttgttagctgtattcctaggtgttttattctctttgtaacaattgtgaatgggagttcattcatgatttggctctctgcttgtctattgttggtgtaaagaaatgcttgtgattttcacacactgattttgtatcctgagactttgctgaagttgcttatcagcttaaggagatttggggctgagacaatggggttttctaaatataggatcaagttgtctgcaaacagagacaatttgactttctcttttcctatttgaatacgctttatttctttctcttgcctgattgccctggccagaacatccaatactatgttgaataggagtggtgagagagggcatccttgtcttgggccagttttcaaagggaatgcttctcgcttttggccattcagtatgatattggctgtgggtttgtcagaagtagctcttattactttgggaaatgttccatcaatatctagtttattgagagttttatcatgaaaggatgttgaattttgtcgaaggccttttctgcatctatcgagataccaattaccaaattctaagattacatggtgttctgcagtgaatagatctatgcaaacctacccccaaagttcaaggaagctgagaggctgaagaggctgacatatccagcttctcaggaaaaatgaaaaaacaaaaaacatttaatagccaggtcccaggtggctgcaagaggagatggtggttcactgcagtgttagccccagacctaggaattatttgctgtagtgaaggaacatgtaggacagttgaaatcaactcctcagggaaaggcaagcatgctatgtaaatctgcctaagggaaggatttatggttgaggctgttttgaacaaagggtagaatttatggtaacagtaggtaaagtataaatcttagaggcattcctggaactggggtaaatcagatgtcagtatggtggactgacaatgaagatggagttgctttagtctccacacatgggaacagatagaaaaaggtgtctttataaccaaaatgttggcttttacaaagctctgctgtaattctaaatagatggaagaggataaatcaaataactgaattaacttaaaaattccctttttagagtaacttcttcaaatttaaaagaattttatcaaagtagtgtgggcatatctactgggggatggagaaacatagagcaagagagagagaactttgtgatggaaatcaagattttcttaaatctctcatagaataattattagagtatttatgaattttcttctcttctccaaattatcttcacttggggttattttatctttatttgtgtatcttggactgtcttttttcaaagcaagctttctttagatgcctgatgagctatgattataattttattcaagtttaaggaatgaaaagctgattgggctctgacttgcactttgctttggagtcatggggctatgaattaacagttttcctgggggggatcagaacatgccagatgatggaagtcttttgtctggagctattattttgatttagaaaggttttattttagtgaagttataaagaatcctcaaatatttctctaagctggagaggcctgtctcctgggtgtcctctttcctgcagggttggatagtggctatttctacccatagatacttgtaattgtcagttccccatgtcactcctgtaccctttcctgtcttcattgcatgtggtgttttggaattcttagcctttctggaaaggcaatttctctctctcagtctgtcatatttatatcccttctagataatctaacctgtggttgactgtatttcatgtgctatctcttctttatctgctttgtcatctatacatctgttgacatattttgtattctcatgactctctttcagttccttactaccattagggttttgtacttttctcccctttagtgacatctaagatgggaaagattgtaaatacatatgaccagattcatcagggaaatatatgctattctaggtagttcacacaagatattatgtaatacaggtaattaaaaggttacatggtcattctgagaacttggagttaggtgattagagaagttgctactagaatgcaagaaactgggaagtggaaagatcacagacagctgccaacagtgttctctggtgccaacagcttaaaacttagttctcaggaaaatctccagtgtgttttgggttttgccaattacattatatcatgtatccaccattactgtatcatacagaatggagaaataacatgtttattgaatacagacacacacacacacacacacacacacacacacacacatatgacaatgccaaaaaagatagatagaacttctaatttcattgatgtttctagtttcctgaagaagctagaaagaatggtatggatatcatttttctgaatatatacataaaggttgaaattaatataactattcagaattttaaaacaatgaataactgtgatatgggatttattttatttttaaaaaaatgaggaagattttcatgttatgatgctttcatacggtatctctcgtatgagtgacaatactgccttttaattttttctcaaaatgttatagggcaacaagagattggcagtatgagctgtctttttattgtattttaatggtaaacttgtacatgattatggggatattctaacttttatgattttttaaacaactctcagttccatcccataaaagagctttatgtagaaatacttttagcagcttttaagtttatttcatcttctcttccccaggagacaaggtaaaagtagagattacattttctggagatattactttcatttatatctttataaatatggatagacaattttataataacagtgctaacactgaaaaggaaaagagtaagattttgtaatttataaataatccttatggggatgttattatttaactctgaagatgttgtttcacttttcattattttggtttcagtcactgcttgcagaatagtaatctcttagcatatgaagtcagcagatcaaatgcaagaaacaaaacaaaacaaaaaactcagaacaaaatcaagaaggctcaaagtttagcacactatttatttcactgtttttaatcatactcaggaagggttttagtgaagaaacaggagtgagattaatcaaaatagctcaaaatgctcaaaacttaagttatatattcaggaggctttaaattcccaccattttaaaaagtgttctttaaacctcaatttcgggtaccttgctgttccttgggtttgactgaggatcagtattttcttgccatttatcacacttaaacatagagcatccagaatcaataaactacaaagcagaagatttagagaatctatctttccagaataatagtcatactttcccaaacatgttctatacaattttaggggactatagacctttggtatatatatcagatgttaagctttttgttccattaacattactgtagtcagttgtaatgctatgttgttaatctagagacaggaatatataacttctattttcttcaaatgaaaaatggctttggtcataagtacctatacccaaatcttatttcaatatactctacattaacagcatgttacagataggaatccagtattatatttacataaattagttatttatctcgatatttacagagtgctaggcattgtgcaagtcaaataatacatattcactgtcctcaaaaactcaacactagctaatgggagaccagcatcaaaataaaaaaataagagcaatacagttttctatgtgcaagacagacacagttctacagggctggggacagaaggcactgaagaggaatggagaaactgaatgaggaaaaactttggagaggaggtgtggctggagctgagtattgaaataggagaaatatttgttcagatattactctttttattttttcatgactgaattccaggcatacgtaccttcaaataccttattgcagatgacctagaaggctgcatgtaaagataaatacatcctaacatttgtatattgttgcttctcaaatttcacaactgtgattacttgctgtgttggttactgatctttattttcatttacttagcatcttcattgataatcctgattgatgtagttttactttcatcatctaaatatctctagtttctaatttattctgtgtagagactttagtttcatcaaatataagtgggcatgaaattatatacctgagccaatagaagaactcaagacttttatttgccttaatgtaggatttaaaaaccaattcaaaaacaattgtttatatatgtgggaaaattcctttaagtttctgttgataggtattggaataggtttcctagtaagatattaaatgtgtcatccaaataaatttttaggttacataaacactgatcttgaataaaatagctatagttctacctggaggtagagagtcataataatatcaaattagagctcatgtttgtgtgtgtatgtgtttgcatacttgtgcacgtgctggcttttatgtacaaaatggtgatcatcaaaggtagttgtcatcaaaaagtcatagattataaaagctaaaaaggacactgtattttaaagatacggaaacctaggcccagaaaaattagacaggttgcttaagactgagagcagagcccagaacttgggcctcttgacttccctttgcaaatatatcattgtgctttgaaattatagatatacggaatcatagaacaggaagaaactgtatgatcatccagagctcattgacagcccctccctcccctccacatatatgctaataaaccctctgctgtctctcttccacttaaatttgcggggaaatctagttagcataaaaacactgatccctgtggctggctatgctttttttttgacagattgtcctgctactgctgcttcccgtcttccttcatcattcacattatgacagacatttgagcagagtctcagtgaaaacttgtttgggggttggtgcctctgattctcagtgcagcctgccagcctcattgggaaaaggtgtttaatataggcagcgattttctgtattatgaactgaaatagaaaatgctgcgatgggttcattcaagggagacccaatatcttacttacaatgaagaaatcaggcaattttggggagtagaagtggaagtgtgactcatacatatattggtattttcttttatgagattttgatatggcacttaatgttttatgctgagaggagatgaagatttctcattttcctacaatttcactgagaaaatcatacagcaaggacacagaacttcatgcaactgccttcttttattagtacctatatcttgtctttctttcctttcttcccttccttgcttctcctttcccttttggtttctttgttaagccttttcttccttccctttatccctccttataattgattttgcttctttgtgttactactttctttccatggttcctccaacctgtagtatgaaagagagtggatatggtagtggttaagagcataggctctaaagtcagactgcctggctttgaatcctctctaccacttactgactgagtgaccttggattgagtcactgaacttcacttttcaattttttatgtcttattggataagtttcaatcagagttgaggatgaagtgagatatatgaaagtgcttagtacaaagcacatgtgttgctatcttatagtatgcagtcacgactttcatatatatattacatttatggttattccaatatatacattttgtgtagaaggcttagtctttcaattacaataagctattggtatagtttagccatctaatgctaatggaaaggagaatgggctcaattgttctaaacaaattttataacttacttatcttgggctttgaagaaaggtatgaggaaattaaccacagagatgtgtgcacacctaagagacattgaccccacttactttctttccttgctccttggctaagactcctatgtaagtgccattgttgctagaagtttgaagcttttgtaaggttttagtttttgtgattttatatcttttttcagatatttaattaaatttaatatatatttgcaatctataacaccatataaataatcatgataaatcaaaagatatattgtctggtccctggtctctcggagctgccaaggctcctagctgctgggaaagctgatgtatatgcaacttggaacataaggcagtgtttattgatgccattgatctttgtaatgggctacatgattgaaccttttttttatttcttctccttagtctttgataatgacttcacatctgtagttatctctttatatttgttgagttgctttttgctgcctgcagtattctagacattttataattagagataaagcttggaatttcctatgcaacatgttttgtattcagcctgctttcttcttcccacagttttggtctggttttgtttattagtttgttttctgcaggtagaaatacctaggaaagacaacatcatttgataaagtataaaatatgcttatttaggagagaatactttaaaaggcttatgaactcttgatgactatcctttagtttataattaacttatttttttttattatactttaatttctgggatacatgtgtagaatgtgcaggtttgctacataggtataaacataccttggtggtttgccacaccaatcaacccatcatctacattaggtatttctcctaatgctatccctcccctagtctccacccaccgacaggccctggtgtgtgatgttcccctccctgtgtccatgtgttctcattgttcaaatcccacttatgagtgagaacatgcggtgtttggttttctgttcctgtgttagcttgctgagaatgatggtttccagcttcatccatgtccctgcaaaggacatgaactcatcctttttatggctgcatagtattccatggtatgtatgccacattttcttaatccagtctatcgttgatgggcgtttgggttggttccaagtctttgcactgtaaacagttctgcaataaacatacatgtgcatgtgtctttacagtagaatgatttatatttctttgggtatatatccggtaatgggattgctgggtcaaatggtatatctggttctagatccttgaggaattgccacactatcttccacaatggttgaactaatttacactcccaccaacagtgtaaaagcattcctttttctccacgtcctctccagcatctgttgtttccagacattttaattatcaccattctaactggcatgagatggtatctcattgtggttttgatttgcatttgtctaatgaccagtggtaatgagctttgtttatatgtttgttggccgcataaaagtcttcttttgagaagtgtctgttcatatccttcgcccactttttgatgggtttctttgtttttttcttataaatttgtgtaagttccttgtagattctagatgttagacctttgtcagatggatagatggcaaaaatgttccctattctgtagtttgcctgttcactctgatgatagtttcttcagctgtgaagaagctctttgattagattccatttgtcaattttggcttctgtggccattgcttttggtgttttagtcatgaagtctttggccaggcctatgtccataatagtattgcctaggttttcttctagggtttttatggttttaggtcttatgtttaagtctttaatccatcttgagttaatttttgtataagttgtaaggaaggggtccagtttcagtttcctgcatatggttagccagtttccccaacaccatttattaaatagggaatcctttccccattgcttgtttttgtcaggtttgtcaaagatcagatgtttttagatgtgtggcattatttctgaggtctacattctgttccatttgtctatatatctgttttggtaccagtaccatgctgttttggttactgtagccttgcagtatagtttgaagtcaggtagcatgatgcctccagctttgttctttttgcttaggattgtcttggcaatgtgggctcttttttggttctgtatgaaatttaaagtagcttttttctaattctgtgaagaaagtcagtggtagcttgatggggatagcattgaatctataaattactttgggtagtatgggcattttcatgatactgattctttttatcagtgagcatggaatgtttttccatttgtttttgtcctctcttatttccttgagcagtggtttgtagttctccttgaagaggtccttcacatcctttgtaagttgtattcctaggtattttattctctttgtagcaattgtaaatgggagtttgctcatgatttggctctctgtttgtctattactgatgtataggaatgtttgtgattttcacacattgattttgtatcctgagactttgctgaagttgcttatcagcttaaggagatttgggcctgagacaatggggttttctaaatatatgatcatgtcatctgcaaacagagacaatttgacttcctctctttctatctgaatatcctttatttcgttctcttgcctgattgccctggccagaacttccaatactgtgttgaataggagtggtgagagaggacatccttgtcttgtgcctgttttcaaagagaatgcgtccagcttttgcccatttggtatgatattggctgtgggtttgtcataaatagctcttactattttgagatatgtttcatcaatacctagtgtattgagagtttttagcatgaaggggtgttgaattttatcaaaggccttttctgcatctattgagataatcatgaggtttttgtcattggttctgtttatgtgatgggttatgtttaatgatttgcatatgttgaaccagccttgtatcccagggatgaagctgacctgatcatggtgcgtaagctttttgatgtgctgctggattctgtttgccagtattttattgaagatttttgcatagatattcatcagggatatcggcctgaaattttttcgttgtgtctctgccaggctttggcttcaggatgatactggcttcataaaatgagttagggaggactccctctttttctattgattggagtagtttcagaaggaatggtaccagctcctctttgtacctctggtagaattcagttgtgaatctgtctggtcctgggccttttatgattggtaagctattaattactgcctcaattcagaactttgtattggtctatttagggattcaatttcttcctgatttagtcttgaaagggtgtatgtgtccaggaatttatccatttcttctagattttctagtttatttgcatagagctgttcatagtatactctgatagtaatttgtatttctgcgggatcagtggtgatatcccctttatcattttttattgtgtctatttgattcttctctcttttcttctttattagtctggctagtggtctatctattttgttaatcttttttaaaaaaaaacagctcctggattcattgattttttgaagggtttttcatgtctctatctccttcaattctgctctggtcttagttgtttcttgtcttctgttagcttttgaatttgtttgctcttgcttctttagttcttttaattgtgacgttagggtgtcgattttagatcattcctgctttctcctgtgggcatttggtcctataaatttccctgtaaacagtactttagctgtgtcctagagattctggtacattgtatctttgttctcactggtttcaaagaacttatttatttctaccttaatttcattatttacccagtagtcattcaggagcaggttattcagtttccatgtagttgtgtggttttgagtgagtttcttaatcctgagttctaatttgctctgtggtctgagagactgtttgttatgatttctgttcttttgcatttgctgaggagtgttttacttccaattatgtggtcaattttagaatcagtgtgacaaggtgctaagaagaatgtatattctgttgattttgggtggagagtcctgtagatgcctattaagtctgcttggtccagagctgagatcaagtcctgaatatccttgttaattttctgtctcagtgatgtgtctaatattgacagtggggtgttaaagtctcccaatattattgtgtgggagtctaaaagtctctttgtagttctctacaaacttgctttatgaatctgagtactcctgtattgggtacaaatatatttaggatagttagctcttcttgttgcgttgatccctttaccattatgtaatgcccttctttgtctttttttgatctttgttggtttaaagtctgttttatcagaagttaggatggcaacctctgcttttttatttgctttccatttgcttggtaaatattcctccacccctttgttttgagcctatgtgtgttgttgcacgtgagattggtctcctgaatacagcacaacaatggatcttgcctctttatccaatttgccagtctgtgtcttttaattggggcatttatcccatttacatttaaagttaatattgttatgtgtgaatttgatcctgtcattatgatgctagctggttattttgcccattagttgatgcagtttcttcatagtgttgatggtctttacagtttggtatgtttttgcagtggctgttactggttgttcctttccaaatttagtgctttcttcaggagctcttgtaaggcaggcctggtggtgacaaaatctctcaggattgggttgtctgtaaaggattttatttctccttcacgtttgaagcttagtttggctggatatgaaattctgggttgaaaattcttttcctgggggaggagccaagatggccgaataggaacagctctggtctacaactcccagtgagagcgtcacagaagacgggtgatttctgcatttccatctgaggtactgggttcatctcactagggagtgccagacagtgggcgcaggtcagtgggtgcatgcaccatgcgcgagccgaagcagggtgaggcattgcctcactcgggaagcacaaggggtcagggagttccctttcctagtcaaagaaaggggtgacagacagcaccgggaaaattgggtcactcccacctgaatactgcgcttttctgacggccttaaaaaacggcaccaggagattatatcctgcacctggcttggagggtcctacgccaacagagtctcgctgattgctagcacagcagtctgagatcaaactgcaaggtggcagcgaggctgggggaggggcgcccaccattgcccaggcttgcttacgtaaacaaagcagccaggaagctcaaactgggtggagcccaccacagctcaaggaggcctgcctgcctctgtaggctccacctctgggggcagggcacagacaaacaaaaagacagcagtgacctctgcagacttaaatgtccctgtctgacagctttgaagagagcagtggttctcccagcatgcagctggaggtctgagaacgggcagactgcctcctcagatgggtccctgacccctgacccctgagcagcctaactgggaggcacctcccagcaggggcagactgacacctcacacggctgggtactccaacagacctgcagctgagggtcctgtctgttagaaggaaaactaacaaacagaaaggacatccacaccaaaaacccatctgtacatcaccatcatcaaagaccaatagtagataaaaccacaaaaatggggaaaaaacagagcagaaaaactggaaactctaaaaagcagagtgcctctcctcgtccaaaggaacgcagttcctcaccagcaacggaacagagctggatggagaatgactttgatgagctgagagaagaaggcttcagacaatcaaattacgctgaggtactggaggacattcaaaccaaaggtaaagaagttgaaaactttgaaaaaaattgagaagaatgtataactagaataaccaatacagagaagtgcttaaaggagctgatggagctgaaaaccaaggctcgagaactacatgaagaatgcagaagcctcaggagctgatgcaatcaactggaagaaaaggtatcagcgatggaagatgaaatgaatgaaatgaagtgagaagggaagtttagagaaaaaagaataaaaagaaaagggcaaaccctccaagaaatatgggactatgtgaaaagaccaaatctatgtctgattggtgtacctgaaagtgacggggagaatgggaccaagttggaaaacactctgcaggatattatccaggagaacttccccaatgtagcaaggcaggccaaaattcagattcaggaaatacagagaatgccaaaaagatactcctcgagaagagcaactccaagacacataattgtcagattcaccaaagttgaaatgaaggaaaaaatgttaagggcagccagagagaaaggtcgggttaccctcaaagggaagcccatcagactaacagcggatctctcagcagaaactctacaagccagaagagagtgggggccaatattcaacattcttaaagaaaagaattttcaacccagaatttcatatccagccaaactaagcttcataagtgaaggagaaataaaatcctttacagacaagcaaatgctgagagattttgtcaccaccaggcatgccctaaaagagctcctgaaggaagcactaaacatggagaggaacaaatggtaccagccactgcaaaatcatgccaaaatgtaaagaccatcgagactaggaagaaactgcatcgattaacgagcaaaatagccagctaacatcgtaatgacaggaccaaattcacacataacaatattaactttaaatgtaaatggactaaatgctccaattaaaagacacagactggcaaattggatacagagtcaagacccatcagtgtgctgtaatcaggaaaaccatctcacgtgcagagacacacataggctcaaaataaaaggatggaggaagatctaccaagcaaatggaaaacaaaaaaaggcaggggttgcaatcctagtctctgataaaacagactttaaaccaacaaagatcaaaagagacaaagaaggccattacataatggtaaagggatcaattcaacaagaagagctaactatcctaaatatatatgcacccaatacaggagcacccagatgcataaagcaagtcctgagagacctacaaagagacttagactcccacacattaataatgggagactttaacaccccactgtcaacattagacagagcaacgagacacaaagtcaacaaggataccctggaattgaactcagctctgcaccaagcagacctaatagacatctacagaactctccaccccaaatcaacagaatatacatttttttcagcaccacaccacacctattccaaaattgaccacatacttggaagtaaagctctcctcagcaaatgtaaaacagaaattataacaaactatctctcagaccacagtgcaatcaaactagaactcaggattaagaatctcattcaaaaccgctcaactacatggaaactgaacaacctgctcctgaatgactactgggtacataacgaaatgaaggcagaaataaagatgttctttgaaaccaatgagaacaaagacacagcataccagaatctctgggacgcattcaaagcagtgtgtagagggaaatttatagcactaaatgcccacaagagaaagcaggaaagatctaaaatggacaccctaacatcacaattaaaagaactagaaaagcaagagcaaacacattcaaaagctagcagaaggcaagaaataactaaaatcagagcagaactgaaggaaatagtgacacaaaaaacccttcaaaaaattaatgaatccaggagctggttttttgaaaggatcaacaaaattgataaaccgctagcaagactaataaagaaaaaaagagagaagaatcaaatagacgcaataaaaaatgataaaggggatatcaccaccaatccgacagaaatacaaactaccatcagagaatactacaaacacctctacgcaaataaactagaaaatctagaagaaatggataaattcctggacacacacactctcccaagactaaaccaggaagaagttgaatctctgaatagaccaataacaggctctgaaattgaggcaataattaatagcttaccaaccaaaaagagtccaggaccagatggattcacagccgaattctaccagaggtacaaggaggagctggtaccattccttctgaaactattccaatcaatagaaaaagagggaatcctctctaactcatttgatgaggccagcatcatcctgataccaaagccaggcagagacacaaccaaaaaagagaattttagaccaatatccttgatgaacattgatgcaaaaatcctcaataaaatactggcaaaccaaatccagcagcacatcaaaaagcttatccaccatgatcaagtgggcctcatccctgggatgcaaggctggttcaatatacgcaaatcaataaatgtaatccagcatataaacagaaccaaagacaaaaaccacatgattatctcaatagatgcagaaaaggcctttgacaaaattcaacaatgcttcatgctaaaaactctcaataaattaggtattgatgggatgtatttcaaaataataagagctatctatgacaaacccacagccaatatcatactgaatgggcaaaaactggaagcattccctttgaaaactggcacaagacagggatgccttctctcacccctcctattcaacatagtgttggaagttctgaccagagcaattaggcaggagaaggaaataaagggtattcaattaggaaaagaggaagtcaaattgtccctgtttgcagacgacatgattgtatatctagaaaaccccaatgtctcagcccaaaatctccttaagctgataagcaacttcagcaaattctcaggatacaaaatcaatgtacaaaaatcacaagcgttcttatacaccaacaacagacaaacagagagccaaatcatgagtgaactaccattcacaattgcttcaaagagaataaaatacctaggaatccaacttaacaagggatgtgaaggacctcttcaaggagaactacaaaccactgctcaaggaaataaaagaggatacaaacaaatggaagaatattccatgctcatgggtaggaagaatcaatatcgtgaaaatggccatactgcccaaggtaatttaaagattcagtgccatccccatcaagctaccaatgactttcttcacagaattggaaaaaaaactactttaaagctcatatggaaccataaaagagcccgcatcaccaagtcaatcctaagccaaaagaacaaagctggaggcatcacactacttgacttcaaactatactacaaggctacagtaatgaaaacagcatggtactggtaccaaaacagacatatagatcaatggaacagaacagagccctcagaaataatgctgcatatctacaactatctgatctttgtcaaacctgagaaaaacaagcaatggggagaggattccctatttaataaatggtgctgggaaaactggctagccatatgtagaaagctgaaactggatcccttccttacaccttatacaaaaatcaattcaagatggattaaagacttaaatgttagacctaaaaccataaaaaccctaggagaaaacctaggcattaccattcaggacataggcatgggcaaggacttcatgtctaaaacaccaaaagccatggcaaccaaagccaaaattgacaaataggatctaattaaactaaagagcttctgcacagcaaaagaaactaccatcagagtgaacaggcaacctacaaaatgggagaaaattttcacaacctactcatctgacaaagggctaatatccagaatctacaatgaactcaaacaaatttacaagaaaaaaacaaacaaccccatcaaaaagtgggtggacatgaacagacacttctcaaaagatgacatttatgcagccaaaaaacacatgaaaaaatgctcaccatcactggccatcagagaaatgcaaatcaaaaccacaatgagataccatctcacaccagttagaatggtgatcattaaaaagtcaggaaacaacaggtgctggagaggatgtggataaataggaacactttcacactgttggtgggactgtaaactagttcaaccattgtggaagtcagtgtggcgattcctcagggatctagaactagaaataccatttgacccagccatgccattactgggtatatacccaaaggactataaatcatgctgctataaagacacatgcacacgtatgtttattgtggcattattcacaatagcaaagacttggaaccaacccaaatgtccatcaatgatagactggattaagaaaatgtggcacatatacaccatgcaatactatgcggccataaaacatgatgagttcatgtcctttgtagggacatggatgaaattggaaatcatcattctcagtaaactatcgcaagaacaaaaaaccaaacaccgcatattctcactcataggtgggaattgaacaatgagaacacatggacacaggaaggggaatatcacactctggggactattgtggggtgggggtaggggggagggatagcaatgggagatatagctaatgctagatgacgagttagtgggtgcagcacaccagcatggcacatgtatacatatgtaactaacctgcgcattgtgcacatgtaccctaaaacttaaagtataatataaaaaaaaaggaaaaactagagtataaatgaagtgtcaaagatgttaagaaacaggatcttttaaaaaattgtttttaattattatgggtacataataagtgtatatatctatgggatacatgtgaaattttgatacatacaatatataataatcttattggggcaattggggtgtccatcacctcaggcatttatcatgtcttgtattagaaacagtccaattctcctcttttagctatttgaaaatatacaataaattattgttgagtataaaaaaaaagtccacacctagtcatattatgttcaaatcacagaaaactaaagacaaccagaaaacatgaaagaagctacagaagagaagaaatttacctaaggagggacaaggataagaattacatcagaaatctcattggcaaccatgcaagaaagaagaaggtagcgtgaaatatttaaagtgtttaaaggataaaactagaattctggatacagtgaaactatccttcaaaagcaaagaagaaatgctttctcagacaaaggctgaatctgtcaccagtagacctgccttgaaataaatgttgaaagaaatttttcggtcagaaatgaaatgacataggtcaaaaactgaaatctacgtaaagaaaagaagagctttcaagaaggaacaaatgagcataaaataaactctttaatattccttaaccttaaaaaaaaaaaaagaaaattccttcctttaagagtggccccctctcttttctgtcttgtagggtttctgcagagagatccactgttagtctgatgtgcttccctttgtgagtaacctgagctttctctctggctgtccttaacattttttcctccatttcgaccttggtgaatctgatgattatgtgtcttggggttgctcttctcgaggagtatctttgtggtgttctctgtatttcctgaatttgaatgttggcctgtcttgctgggttggggatattctactggataatatcctgaagggtgttttccaacttggttccattctcccatcactttgaggtacaccaatcaaacgtaagtttgtttttttcacatagtcccatatttcttggaggctttgttcattccctttcattcttttttctctaatcttgtcttcaccctttctttcattaaattgatcttcaatctctgatatcctttcttctgcttgatcaatttggctattgatacttgtgtatgcttcaggaagttcttgtgctgggtttttcagctccatcaggtcgtttatattcttctctaaactgattattctagttagcaattcctctcaccttttttcagtgttcttagcttctctgcattgggttagaacatgcttctttagctcggagccatttgttgttacccacattttgaagtctacttctgtcaatttgtcaaattcattctccatccagttttgttcccttgctggtgaggagttgtgatcctttggagaagaggcattctgatttttgtaattttaagactttttgcactggttcctccccatcttcatggatttatctacctttggtctttgatgttggtgacccttggatggggtttctgactggacatcctttttgttgacgttgatgctactcctttctgtttgttagttttccttctaacagtcaggcctctctgctgcaggtctgctggagtttgctggatgtccactccagaccctctttgcctgggtatcaccagcagaggctgtagaacagcaaagattgctgcctgttctttcctctggaaggtttttcccagaggggcacccaccagatgccagctggatctctcctgtatgaggtgtctgtcgacccctgctgggaagtatctcccagtcaggaggcacgggggtgagggacccatttgaggaagcattgtgtcccttagcagagctcaagcactgcgctgggagatccactgctctcttcagagccagcaggcaggaatgtttgtctgctgaagcagcgcctacaggcacctcttcccccaggtgctctgtcccagggagatgggaattttatctataagcccctgactggggctgctgcctttctttcagaagtgccctgcccagagaggaggaatctaggaaggcagtctggctacagtggctttgtggagctgagcccagtttgaacttcctggtggctttgtttacactgtgaggagaaaaccgcctactgaagcctcagtaatagcagacacccctcccctcaccaagctcaagtgtcccaggtccacttcagactgctgtgctggcaacaagaaatttaaactagtggatcttagcttgctgggctccacaggggtgggatccgctgagctagaccacttggctccttggtttcagccccctttccacagttgtgaatggttctgtctcactggccttccaggtgccactgtggtatgaaaaaaaaaaaaaatcctgcagctagctcggtgtctgcccaaacagccacccagttgtgtgcttaaaacccaggatcctggtggtgtaggaacccaagggaatctcctggtctgcaggttgcaaagactgtgggaaatgtgtagtatctgggccggaatgcaccattcctcacagcacagtccctcatggcttcccttggctagaggagggagttccccaaccccttgaacttcccaggtgagttgatgcccaaccctgcttcagctcacacgccgtggtctgtacccactgtctaaccagtcccaatgagatgagctgggtatctccgttagaaatgcagaaatcacctgccttctgcattggtctcgctgggagctgcagaccggagctgttcctattcggccatcttgccagccagccactgtaattcacttattttcaaatgttaccattagaactgtataccatattacaagtttcaaacactatcctgccagggcacaaaagagttcctagttgccttaaagaattagctattgtttcatctgtgtgtggcttcgtctcagagggtgattgaaacatgacaagaagtgatttttttttctcaagagaaatggaggctttggacattagtgtcatagcaatgtcatgtagaacatacatagagaattctatgaagaaatcagccaagccgtgactatcgaccaaaattttcaactttcaacaatgagatgaatatactatctatatatctaataatccaaagcttcatttatgaacatattgcttctcaaaataaaaatttggagcagtttgtgatttaatgatggaaattttttataagaactataatggcagttaaattataaaactgaagttactaatatgaatcagtgagcctttcatgagcttttattttaaccagctaaaatactaaaatacttttattttaatcagctaaagcattcaacttatagtgaggagagttttgttttcaacacagttacgaaagaattcgggctcacttaattgtaaataaaaatcttaaagaagaaaccattgtttaaaatgttacctcattgagtttttcagtaaatggaacaagaattaacatttagggtaataatagtttatgtctgtttttaattatcggacagaatacttagggaatggacagaggcagtaaagaaaaatagttcattatattataatgtatcattagttttgaatgtgcatacacctaatattaactgtatgtatagtacacaattggtcattttatttttaaaatattacctcatatcaataatcctaatttaaatggttaagaacatggaaataatttccatgaagtatgcatttctgagtaatggttgtatataaccaaaatgaaagctaattaattcatttggtgaaagttatagtgagataaagcacagactgtagacatatacaacattaattaggacaatgttattctacatctacaggtggaatttccacccaacctggaggctcatcagcatttaccttttattcaaaggggaaattggtgagagagtagaggcagataatcacagcatcccactctactagaaaagcaagccacagctcccatcctgctggtgatgtgacagcactggtctttctacacagcagcacactagtaccaaaaaagaggctttgctttttctgtgtgatgagctgtaaaccttcatattagaaaaactcagaaaagaattttgcttagacgctaatcaaatacaaaaattgtggctgatggaaactacacatagataaattagtccaatattcttctacttgtgaaatttaaataacttcatcttaagaaataaaggtaattgggaaaattgaaaaggaagtgtttccagttttgatagagtgaatggggcattcaaaatatatttctaaatgaatgataaaaataaaatacttgcaatattatcagaatttatttccacaataaatatgttcaggaatgttaagtggggaagcctgggcagccattgtgctgtaactggctctgtttattttttgctcttcaaaagagaaagaaaggaaccttagcacaatagcagaatttcctgatggtggctattacaattttaccactgaggaaaggacatctatgggtctttgaaaagctaggaaacatcttgaatatcagaaattgtaaatgaatactacttggtgtagattaaactaaagacatgggattatatggtctcaaagccacagatgtagttgggtcctaagaaccttgtcatatatatctatattttttattttttttattttttttcttttattattattatagtttaagttttagggtacatgtgcacaatgtgcaggttagttacatgtgtatacatgtgccatgctggtgtgctgcacccattaacttgtcatttagcattaggtatatctcctaaagctatccctcccccctcccaccaccccacaacagtccccagtgtgtgatgttccccttcctgtgtccatgtcatctcattgttcaattcccacctatgagtgagaatatgtggtgtttggttttttgttcttgtgatagtttactgagaatgatgatttccaatttcatccatgtccctacaaaggacatgaactcatttttttatggctgcatagtattgcatggtgtatatgtgccacattttcttaatccagtctatcattcttggacatttgggttggttccaagtctttgctattgtgaatagtgccacaataaaacatacatgtgcatgtgtctttatagcagcatgatttatagtccctttgggtatatacccagtaatggcatggctgggtcaaatggtatttctagttctagatccctgaggaatcgccacactgacttccacaatggttgaactagtttacagtcccaccaacagtgtaaaagtgttcctatttctccacatcctctccagcacctgttgtttcctgactttttaatgatcaccattctaactggtgtgagatggtatctcattgtggttttgatttgcatttctctgatggccagtgatggtgagcattttttcatgtgttttttggctgcataaatgtcttcttttgagaagtgtctgttcatgtccttcactcactttttgatggggttgtttgtttttttcttgtaaatttgtttaagttcattgtagattctggatattagccctttgtcagatgagtaggttgcgacaattttctcccattttgtaggttgcctgttcactctgatggtagtttcttttgctgtgtatatggaactaaaaaagagcctgcataagccaaaagaacaaagctggaggcatcacactacctgacttcaaactatactacaaggctacagtaaccaaaacagcatggtactggtaccaaaacagagatatagatcaatggaacagaacagagccctcagaaataacgccgcatatctacaactatctgatctttgacgaacctgagaaaaagaagcaatggggaaaggattccctatttaataaatggtgctgggaaaactggctagccatatgtagaaagctgaaactggatcccttccttacaccttatacaaaaatcaattcaagatggattacagacttaaacattagacctaaaaccgtaaaaaccctagaagaaaacctagacattaccattcaggacataggcatgggcaaggacttcatgtctaaaacaccaaaagcaatggcaaccaaagccaaaattgacaaataggatctaattaaactaaagagcttctgcacagcaaaagaaactaccatcagagtgaacaggcaacctacaaaatgggagaaaattttcgcgacctactcatctatattttttaatggatttaaccagcaagaaagaccatggagccacctaaatttttccaaaatctgcaaaatgaaggtgatataaatatgtcacttagacaatatttcatttttgatataaaattttattttttatcagtttgataatatgcataggactaaaaaatgcagttgtcttaaaatattttagggttgcttaggaaatcactttaaaaataaaaagtgtcagaataaaagttgtctgcttatgttccatatttcagaactacctttgatttctttagctaaacaatattgcacataaataggttaggaattatagactttcagatgtgctacctgtctcccttcaaaacactcatttaggtaatgtattaattatttttagaatcacctgtcttctctgcttcagcaaaaaccccaccagggcagagatcactctccctcttgtttgctttgaatttttatgacttagcacagtgattggcacataaacattattaaaaccaatgaatgaggaaagcaacgaataagtaaacaaatgggcccagactaaaaagtaagttatatgtattagtgagagtcaataataaattaatgaaataatcttttatttgaaactgaagcaaattaagggaaatttatgaaccttaaatctttttgtaaagatctagtaccaataagataaaaaaaatgctcatccttttttccattgaaatgttatgttcaaatgagctttgtttctatactttatacatcaattaagctgaattcataggtgctaagcattttaacatattgtattgcatgtaatattccctaatgccccaaacttcaagattatataatggcttactctctccctgtccctacccaccagatagtgttatccacatacattctcatctagttttgttctgtgatgaaaaaccatatgcgtatcctattcctatgtgaattaacctggcatgcaggtaactgaagtgcatgtgatctggtctctgctgacatatcacaatgggcccccctccttgcatggaggtagcgttttttataagacaaaatgtttttaaatagaacacatttcagatttcagattttatatgtattttgtgtttttcctccctctacccctttccaaaattatgaatgaaattctaggaccatttatagacaaagcacagtttagtccgagtaaaccaatggaccctgaagtgtccaagtcagagtttatttgcagaatttaattcattcccacagagataggcaacccaggcctgtgaggacacgagggtaactaggcaacaaagtgccgtagtcaggcttgtgtttgctttttggtaagaggacaacattgacttcagtgtcagggcataaaggagactcaggacttattaatttttttccccataattctgtgaactttgtgaattccctaatattcttttaacaagagttcggagacatgagtttatgtgccttcttggatatattcacgggagtttgcagagaaagttgaataaattattaggttaatggcctgtgtaaattcaccaacaccttttcactatctcatcaatcatcctgtttgagttattgtgattcactctgctgatgagctcacacccttttttcctgatacaggaattattgtacaccaggggactggattttaaacaaaacgtattccttagaataacttgaacaatggattggtgggtccttacactattatgtgctgtgtagctgtacaagtgtgtctgcatgagctttaggacattatttgagatattttaagctatgtgtacctcatgaacttgtagctgattttccttagttcttttaaaatattttctcagaaaaccaacagtaaaatctatcaggttcacatgaatacactcatttgtgtcatatcaacccaaaatgaatatgatcttccaggtaatgatgaaggatgataactataatatttccagccaaactttattttgaaacatcactcagtgtttcacatgtttagtggctgttaaattctatatgtctaagcaaactgtgaagagcataattaacttatttggttgttgtgtatcttttaaaatcacagtttgaatctgctgggaatgttatagtggcactagtagcaaaggaatggcaaggatgttaagactttctcatgctaagaccccagcttggtattgagtttttaggaggggcccgcatgacatctctaattgctttggcaatccaattattgagacaagtaagtgagcccatcgggtgcctcccaaggaattaacttggtcatttgatataatgttgcactctccctatttgggaggaggggtggccaccctcacctctgccattgaagattaacccactacaaattttcaaaaatataatatctaatttattacacagactatcatatgggtttcataatccttaagtatctctaaattttattattattttagatttttaaataagactccacctaacttgatggaaggaaaagggggtctagaagcatacagagtttggctcttggttctcagagtgactcgccatgtgaacatgggcaagttatttaacttctttgagccttttgaattttaatctgtaaaacagagacaaaaatgccttcctcagagggtgaaaataaggattaagtacaataatgaatgcaaaatacctggcagaggacctaccttgatgtgctattctcaacattgatatttaatcagtatacacaagtatgcccttttttttttttttgagacggagtctcgctctgttgcccaggctggtgtgcagtggcgccatttcaactcactgccacctccgcctcctgggttcaagcaattctcctgcctcagcctcccgagtagctgggactacaggcatacgtcaccatgcccggctaatttttgtatttttaatagagactgggtttcgccatgttggccaggctggtctcgaactcctgacttcaggtgatcctcccgcctcagcctcccaaagtgctgggattacaggtgtgagccaccgcaccctgctgcatgcacattttgcctggatgatcttccaggctaccatgtggatctctctcatacagcagagggagagttgtacagcaatgagggcttcagaactgtgtctgacccatgctgattgctcagtgcccctgagcacaagtttttaaacattttgaatctcacccataatatttctcatcttgcagagacagagagcattgtggctatataatgcaggtaaagtacctagtgtaacgaataacatgcggaaatgataaatatcataagttgtattactgcctgtggtagtctgaataatggtcctcaaaagatatccaagtcttaatttccataacctgtgaatatgtaaccttatatgtcaaaaggaactttgcagatgtggttaatttaaggatcttgagatggggggattttccttgatgatccaggcaggccctaaatgtaattataaaggggccttttaagagagaggcaggaaggtcaaaggcagaagaaggcaatgtgacagcagaagtagaaattggtgtgaagccgcaagccaaggcatgcaatgctgaaagcctctagaagctggaagaagaaagggatgaatcccccattggcatctccagaagcaattaatcccactgacatcctgattttagcttagctctgtaagactaattcaggacttctgacttatttgtggtgttttaaaccactcagtttgtgttaatttgttgtaagggcaatgggaaatgaatgcacttcccatccataaccctgtctctagctatgttgaagtctttaccatcccccaaatctgacttttacttgcatgcttcttgcctttacatatctgcttttccttcctgcttcttcctatctcccacatcattgcctttctcacaacttctctactcagcaaattcctgcttatcctctgagagggaggacaagatcatctcagatatagtttgctagctaagaaaagagtcctgagactgctttgaaatcttgtggtcctttatccatagctcatgtaaataactctgagctagcagtgtatattatttttatttcatcctggaactatgtcttagcaatatttttattggagaaaaaactgagagcaaactctctgtttcccacatgcctattgccaaatttctctgggtgctttactttcactgcactgattctagaaattgtattgacaactgtgttctaagatgaccctttgattcatccagatggtgtgaaaatgttcctcttcaaaaaccccacactgcttttcaacatcctaatgggtagaatctctaaatccttagggtgtcaacaaaagcaaagggcatatttacacttcagttgggtgaaattaattagcatggaagttaatatttacaattaatggagattacctgactttaatagtgagattgtgtagctactttgtatcactcactctttttttgttgttgttttagaaattgtggcaaaaaatggataaaataaaattcacccttttaaaacattttttgaattcctggagtgtaaaagtggtaggataaccaaaacatcctctttcttgttgaaccatcaacaattgtcttttgaaaagaggtttgaatatcttttctttgaaaatcctcgtgcaaaacttcacaccatgatcatttatgaggtagttatcagacactggagatgaattactggggatttttgtgttctggttctcagtatacaaccaaaggtagaatattgacattgaaaataaatgtcactcgtttctcaaggaaaatttgtagtttaccgaacaacagcacaaatgaaagctgagatactttaccagtgatattgtaggtctcagtgagtaaaaactcaattaaaagtatattggggtggcgggggcactgtgtatagatagacctggacatgatctctaatcacaaatgctacttttagaagggccagattcttgatacagagacattttatttggtggcaataaccatggcttgtccacagaatgatgccgtattattctcctgacctaacttcaaagaaataaagagtttgcaagaagaactgcagttcttcaaagtacgcaatatggatttccaagatgaatgtagtttctctctctgaggaattctgaacagtggtaaagtttcacaagtttatgcatatcttttgctctacatccttccctaaaagaacttgtggcaacaaacaaagggaaagaaataacattttttaataactatgtggaaagctctatagtaagtgcttcacatgttacctcatttaattcttacaactaccttatctagtaaattatctcccatttgacactttaaggaagcagctaagagatgtttcataactttcctagaaaaggtaggatttgaatgcaggtttgtattattccaaagctcacaatgtgctttacgcaacatcaaagtaacatattgcgggaatgagtacctttcccatttaaaacaaatgagtcctggaaactcttaccctgtttagttatggaatggctcagaaaatagaaagtgttgagatcatcaaagagagaagttaacaaagagcattgtaatccagaaataagaacgcaatagagaagtagaagttgtgtggctaattttaccaaactaaatagcctgaattattcagtgtgactatacacattgatcaaattaaatgagcataccatagtctaaaggggacgagatttatattctatccaagaagtcattaattatgtttgtactatcttcatcatggttatcatttttcttagacatagcctaatctataagattttactgtatttccctgaattactaaattcttctatttttgaagttttactaagattttattgtatttccctgaattactaaattcttctgtttttgaagttttactaaatacttcagaagctttactaattaaaaaggtaatttataatgtttatcactaaccagttgataataaagcgcttccttatagcttcttaagataatagctagaaaacaaagctgattttaattattcttgtaatttgcttcaacttcactgacagtctgttgtatattttctgcatatgtaattacatcaggttttgactattttctctgaggtaaataattccaattactttaacctgtcattgtttctctttctctctcatttctttctctctccctccctctctctttctcttattataagacatattatttgtttaattttaatagctattccagcagttaaatattcttatcataaatttcttgcaatttttaaatgtggaattccagtacaaaactttggtttagcagtaggtaaaaagatagattgaaatttatgtaaacatattattcttcatcaggcagggctagctgactgacatctgctttggtttggattcaaatacagatttaaagggaggctatacatggaaattatccccaggctcctccccgctgctgttcccaatttctgcagcagcctgcatgcttgtatttaggattcaccaatttttttggcccttgtgtgtgcttggcttttgttttgatttactctacaatggcaggatgttctgggaactgatgtgatgaagtaaaggaaagcaaatagcctttgtcatgtttaatttcccttaaaatctatttgccagtgaaaggcctttaaaatttttcattataattaaatgtttgttaaagcaaaaagcctcttcttgtatctatagactaaatcagggtttctttaatcataggtggttaatcctcactactcctttacccaaatacatttcataagatgctaaagatgtcaaggaaaattcatatctctgactaacagaaaatattctttcacaaataaaatgtgaagtgttcttagttgtccactattcttttaggtcctacattattctatatctattttcaacaaaagcataaattatgggaacattgaattaaaataacatgaaggtccataccatgtccctggatcagaagtctccaaatcataaaaattgcagtggtccatcaactgatctgtagatttgatataatttaagtcaaaatactgacttgtttattttgggggaacttgccaatctgggtctaaaacttacacggaaaagcaaaaattaataggccactgtagattttccttacgaggtagtgtgagtttttaaattcatttatttatttatttttgaacatttaatttaggtttggggtatatgtgcaattttgttataaaggtaaactcgtgtcacaaaagcattgaattttatgccatgttatctatggttgaaatataatagggagcgagtttattttaaaatcatgtgtctttttaagatttgatttatgctgacttcagaatgtgacgagttttagaaatctgagtgtaggaatgaatgttctattggaagtatctagtttattgctttcagctctactgatcatggatattaaccaactcttgtttttgttttttgtttttttgttttttgagacggagtctcgctctgtcgcccaggccggactgcggactgcagtggcgcaatctcggctcactgcaagctccgcttcccgggttcacgccattctcctgcctcagcctcccgagtagctgggactacaggtgcccgccactgcgcccggctaattttttgtatttttagtagagacggggtttcaccttgttagccaggatggtctcgatctcctgacctcatgatccacccgcctcggcctcccaaagtgctgggattacaggcgtgagccaccgcgcccggccttaaccaactctttaagcagtgtttggctcatggacattggggttaagtctgtgtaattagggctttaggatattgggattaattaaaccagttgctgctttaatccagcattttaggcatcaatggttgatgatgggaatgattctgtaacttgcatttatggtctaagagctcactggtgtatatacctgggttaattggggattttaggtagccagaattggaaaatagaatgcacagtatgagaaattcccccgtctctgaggatgggggatgctggggcccccgtaccatcaagtagcacatccacaactcactccatttaccacatcatcaccatcaccaccaccaacaagcacttgacctccatcctaacttcaacaatcaccttcagtctgcctaactgatgctatggaagaacaacagagactcagaagggtaagagggtggtggtggcgggtggtagatgatgaaagattacttactggtgtgaaccttcaagatttgagacaagtcttagttaatttggaaagtttattttgccaagatggcattgaggatgtgcacccctaacagcctcaggaagtcctgacaatatatacccaaggtggttagggcatagcttagttttatacattttagagagacatgagacatcaatcaatgtatgtaagaagtgcactgattcagtctggaaaggcgggacaacttgaagcaaaggcaggaagactggaagcgggaacttacaggtcacagataagtgagatgaatggttgcattattttgagtttctgattagcctttttaaaggaggcaatcagatatgcatctatctcagtgagcagaggggtgactttgaatagaatgggaggcaggttggccctaaacagttcccagcttgacttttccttttagcttagtgatttgggggccccaagatttattttcctttcacactgggtataaggtacatgatttgagtgatggataccctaaaagccctgacttcactgctatgcaatctatgcatgtaacaaaattatacttgtaccccatacatttatacaagtaaaaataaataaataacaaaaacaaaacaaaaataacaatggccctagccataaagcaatttttaatttagcggggaggacagatatgtatctaaccagttatactggaaagtggagtgagctcaatatgctaaaatagaattattgtgcatcataaatgtttaagaggagggaaagggtaatctgactggagggattgaggaagattagagaagttgtcattgacttggccttgaggcaaaacaggggtttatttattcagcaaatcaatatgtattgagtgcctagaatttaggaatcattggaagggcatactgggaagagattatattgagatcaaagatcaaaagagaaaaaaatgcaaggaagtttttagaatgttgagtcacagaagggtcttaaagcaaagaactataggaggaaagaggcagttgaggaatgtaaactaggaatatggatcaggggcatttcatggattttactcatttttatacaagtaattgggatacttccttcagtcagcggcaaccatgaaaggttttgagttgagtgaaatgaacagagcatgatttattggtggatatgttggagggaaggaaaaattatactgaggaagaccaattagaaaaatttcacaatagtttaggcaaacaatgagggcagacagacccaggatagtggctgtagaaacaaaggaacagatgtgaagaattttatacagatgtgtgttgagattgcacagtggtgaaggcagggctttgggggcacccattactcaaataatgtacattgtatccagtgtgaaaggaaaataaatcttggggcccccaaaacatgaagctaaaggaaaaagtcaagttgagagacagaaaagatagaagaaaaaggcaaagagagctcaaaggttatcagcctgacagtgataagtgattaacagaggaagagtgtctgggtccatgaaatagtgatgtatttgggcaaatagagtctatgttgtctggggtgtaagctaaaagaatcatttagcaaatggagaagtgaaataagagagaagtatttcagggtcctctgtttggaggtgaatgacagttgaggccataagaggacatgatcgtatcaggcatagaatatagaacagagattctcagaattttccaactcattcacaatacccagaacagcagaggacacgaaagttttaactcaagttatttgatggcacagttcaaaatgcaacatttctttagtatcatgtgttttgctttaaaaatatggatagattctttattccactgcatgatgtagtcacacatttcttcctgattccagcactaatggacaaggttttgctgtattgagattcatttatttaatcaacaaatctttattgagtgtccagcatgcatcagacaccattccaggccctggggatatgtctgtgactgaaactggcaaagcctgtgatgacgcttacagtgttgtgagagggagacagacaagagaccagtaatggatgagatatttcagaaaacaagtactatgatggaagtaaaacatagtgatgagatgatgagtggtggggggcaacagcaaagacatggagtcaatctaggtgcctattgacacctaggtacatatacaccatgtggtaaatatataccatggaatattatgcaatcataaaaaagaacaaagtcatgtcctttcagcaacatggatgtagctagtggccattatcctaagtgaattaaagcaggaacagaaaaccaaatacctcatgttctcacttataatgggagctaaaccctggttatacacagatataaagatggaaacaatagacactagagactccaagagggaagagggagggagtggagcaagggttaagaaactatctattgggtacaatgttcactatttaggtgacaggttcaatagaagagcaaacctcaacatcatgcaacatatccatgtaacaaacctacacatgtgcctcctgaatctaaaattaaaaagaaaaaaagagagaaggaaaaaaatggcgggggaatgagagggtatgactaaacttctctgaagaggtaacctttgaactgagccctgaataacaacgaggatacagttatactttgggacaagtcacctggacagaaaaaatttgcgtgtgtaaaggcttttaggtgtgagaagctcattagtatggagaaaaaagaagtctacagaaacatgaagcagaatgaaattgaagagtgagcacggttctgggataccatgctgagaagtagattttattttaaatgccacagcaaatcattgagggttttcagcaagaagattaaacgatctgatttaagtttgtaaatgattcctctgcctagggtgtggaaaatgtgttgcatggggctagaagtgaaaactgggaaaacagctgaggggatggctaatggacttatcatggtgttgaaagtgatgagcaaaagactaacccctaaatattattcatcgagtttatcattttcctgtataattggactgagttaaagacagctaatcacatacattcggttcagtatcactacactttttcttgtcttggtgtttcctcattctcaggactcaaattaattaagtacatgtgagcactttaaagattttatgatctgtgcatgaggaatgatgtgtgaagataaggccagaatcataaatggaaggatgatgccatgttgtcaggctgctcttgccaaaaatgtgaatgtgtctatcttactgctgagtcattggtgcacttgtctacttgtctgggtggactaaaagagtctctagtccactgtttttgttgctgttgttgttgttttgttttaaacattcccatggaaatatttagcaaggacattttcaatgaagaaatatgaatagtgatctttgtttcgtgactaatgctgtaatttttgcacatgtaaatgaactgagcctcaaattattcacattctgatatatctctattcaactctcaaactatcatttcatgttataattttgctaccatttataaaaaccatcaccacattacctttttaatagttgaatgacagtgttctgactttgagggaaaaatctgctaactagacaatcccatgtgacccacaatttgttgttaagtataaaaaataaattaactcataatatttaggatttgtttgtttgttgtttctgagatagggtctcactgtattgcccaggctggagtgtagtggtgcaatcttgtctcactgggttcaactgattgaatgcagtgagactccacctcctgggtttaagtgattaatatttagggttttttttaaatcatgatgtctttgttacttacatggaaataaactaatttatggttgaattagaaaattctaaccatgagtactatttatatttttcaggaagaatacatctagtagtggcacaagctttctaagtctcttctcattatattagaattttacctaaaataataaatattaaaaatatggtatattgtaaaattttctagctttactaaatcattttacatgctgagaaaaatcaagaaaaaaagttgttttgagtggtctcttggtaaatgcaaaacactttaaagttaagactatgtctgctttacttggagttgaatccccaggatctagcatagtggttggtattcaagaagctcaaaactttgggatgaataaataaaatcattagttgctggagtagtcgggggcataatgtctttgattcaaactattgcttccaaaggtttgcttaacatagatgtgagtctaacatttttcttctaatgctcacatcttgctgcaaacgttttcataagttctactttcaagttctttggcaatatcttgacagactactttataagtgaggccaactaataaagtagttacatcatttacatctgtatcttcagtctaataattggtataaatccaatttatcttcatattcttgattattcaacaatgctttgtcctgtaaaaatacacctcaaaaatacatctcaagtgcctctttttgaatcagaacaaatctaatctaacttgcccacacagagctccaccaaactatcccttgccaggagttctaccttccttgctgcttttgaaacaaacaaaccttgatgatacttcaagcagttttttttttctctgcttgtttgtgcgtttgaagcattgctcataaccaagattttgctctcttgccttttaacttcaaactgtttttccaaattgatttatatgttatatattcaatggatgtttccgtggaacaatttttcagagttttccactgaacagctaaataaggctcattttgtatctccaccgtgatttaaaaacctctgttttaaatgaacatcaaaatatgacttacaaatttgtggccaactgcagtgctcatttggagttccataattgtgcttggggactgttacatgatgccttaaatcaccaaatgccctgtgatgtaccccatgcttcaaggttgttctgaattcatctcagtatcttttccatttttaccacttacaagcttttgctccaaacataactgcttgtgaccacctctgtaaatttctaattgaaactgtaattttaaataaatacatctttgaaacaataaatacagagtgacagttctctaaagttagaatctctagacttattgctattttcagactagcttcaacaagaaatgcaactaagcatagtttcatgtctgtacacagaacttttgtttaagtacatttgtggtacttgaaccacatgtggttgaaccagtggttatgtgtgtgcatgttcaatcaaaaataaaataaacaattatggtttgtaagaagacacactgttttataaattctctctctctttctctctccctctcacttatagttgaattagaaaattctaaccatgaatactatttattttttaaggaaaaatccatctaggtagtagtataagttttcttagtcttttctcattatattacagttttagctaaaatagtgaatattaaaaatattgtattttgtaaaattttttagttttactaagacattgtacatgttgaggaaaatcaagagcaaaattctctgacccattttttagagaaatactagccctatggttgggaattattagtgatatctgtggtcacagtcgtgcatacgttcactttgatttgattacagtgttagtgacacttgcttccccaacaactctgatgtaccatattttccagtcactcattatatgtgaatattttctacttacaggacttaaaacatgaagtttgctgacctggaatagtatgaattattctgcttctaaggttgtttcagccagccttataatgcaactagtgtgagaagcagtgacacaaaaaagaatagagccaaacttcaggtaacacccttttaggagtggagagaaggggacctgtagaagtagagaaagaaatctgaaaaggggaaaactaggagcatcagggtgattgatgcatgtgaagcaggaagaaaggcttaaaagacattgttagtggggaaatgaagacagataagaaaagaaacaggcctttggagctgaggtctaggaaattattggtggggggaatgcaactgaaattgctaggagttgagtcaggcagctatgagcaagttcaatggtaggtataaaccatgctttcaaacaaaaaagttgaaataagaaaacaagagcccagatgctaaggacatggggaaattaagaaaacagttgaggtagagaaagaatttaaggagggctgaatgctataatagctgccattatttgactgcttattatgcaccgtggagagttctaaatgctttagctaatttaatcttcatgagacacctaagagataaatcctgctattattattcatattttggataggagattaaggcacagagaggtcgtacaaacaagtgagtgtcaggattcaaagaaggaggttttgctccagaggcctcctgaatttaaccactgtgctagagacacagggacattcaatggagcattaatgtcccgagctggtgacaggtcgagctgaggctatagatgtgttgaggagtcagcatcagtggaggaggaaagagatgcggatggagggagactcggtgtctttgaaatagataagagagagagacaatgtaatggtttccacttggcacagaaagaaatgccttactaattagaggaccagggagacacaagaggagcctaagaagaatggaatgaattagaatcatcactgtggagtctgtgatagggagtcaactaaagtggaaataagtaattaccaaataacaatgaggggtcagcatcggcaaaggaatatgtttgtaatagaggcttcgcagctgtatctggagcctgggagcgcaggctgagagggacattgagatgtaatgagggatgtgacatcttagacagagagagagctgggatgctctcaagaacttcattgatatccctgtctgtaatagaaagaggtaagtatagcaaaaaagttagagccataattggttttcacattttaaaaattggattatgattaaaggaaaacatttaaagaccttgtctaaaggaatataaaattcttgagtctaggcactctccataacttaaattaacttccccatttcttctacaggaatactcctctgttataaggattcaataaatatggtgactttattgttattcgaaagattatagggaactttaggaggtggtatgggtacagaggagtccatctacaaaaacgtttttagcccatcttctaagctaagctgattttggaaaaggagctcttttaaggagaataaagctacaaaaatgacctttaaaactgtcctatccagactctggctctctaaattggaatctttgacaaaaccacagctggaagacagcagccagtaatacagcagccattaatacagctccatgtccaaagaggagggatgtttgtttctactaattacacaaaaacatgcaatattcagccaggtgtgatggctcacacctgcaatccttgcactttgggagatcaagtcagaagaatcacttgggcctaggagtttgagattagcctacacaatgtagcaaggctccatgtcttttaaaaaataaaattaaggtaaaaataaaataaaaatgcaatatttactgctaagatgtgcttcttgaggatggacttgaaatggtccaccaccaggacattaaagacagggtctgctcctgctttctcctgagagaggaagaacactggttagatttacagaagtatcaataccaatattcttagtgtatttagtattcctgcatttataacagagcatccggtaattgacttgaaatttgacctcagcttttcatccagtatgctaatgatggtataaaatttacactccttacataaataaatgtaccctcaaatgtgtcattttcctgcattgacagatggatcccatgcttaaaattaccacaaattcttattctgagcagctttgcacagcactctgcatccacttttgttgtttgccacgttatagcactgcttgtgccctgagcttgcgtctcaaggtggctacagcgtgacattttccttgaagagcgataggcagaatttaattgatttcattttgcttggattctcaaaggcttctgtggctatgcctattacctaacactgctctcaggaggtataaagctgtgtccagttgttcttgttgcatgtcattgagtgacttggtgccacttgcagcagcccttcttgcattccaatgactgcattcctgaatctattatgacatagagactctagggaccaatgaggttttgtgtaggagggctaacttttattttccccttatagttcctttgtctggattttccccctttcctatctatctttataaagagaccttaaatgaaggctacagctataagatgaacaaatagctggctattaaaaatctccaaattgtcatataaatgcaaacatgatcccaaatgattggtttgaataaaattcagactttactgattggaggtgggcaattcccagttataggctgaccttccacttccttcagagctaaccctctaaacaagattaagcttatgtctaggatgggagagagaatggctggaagaaaagaagatgtttcacttccttatgttgtggcttaatgtaatggcttaagaacaataattattttttttcctcacaatttgttaggccagatcaggtattggcttggtgattcttctcttcatgtggcatcaacctagctgcattcaactggtgacaggactgggctgagctgggctgggctgggttggtctgggctggaaattccaggaagccttcactcctatctgtggtgcctcagggctcctctgtatattatcttttttctttcactgtcatagtgttctctagagaaatagaaccaataggctgtgtgtgtgtatatgtatacatacagcctgtatgtttgtgtgtgtatgtgtgtatacataaacatacaaatgaggcatgcctcattttattgtgttttgctttatggtgcttgacagatattttattttttcaccaattgaaggtttgtgaaaactctacatctaacaagtgtattgatgccatttttccacagcatgtgctcactttgtgtctcattttggtaattctcacaatatttcaaactttttcattatcattatatttgttacggtgttatgtgtgaccaatgatctttgttgttactatcataattgtgttagggtttcaaaaaccatgcctatataagattgtgaacttaagtgatagattgtgtgttttctgactgctccaccaaccatccatttagtccatttattatctctctgtctctcctcaaacctccctattctctgagacacaacaatattaaaattaggccagttaataatcctacaatggcctctacatgttcaagagttttcaatctttttctttaaattaaaagctagaaatgattaatcttagtgaggaaggcacgttgaaagctgaaataggctggaagctaagcctcttgtgccaagcagctatccaagttgtgaatgcaaaaaaataaaataaaagttcttgaagttctgaattcttgaagcaaagaagttcttgaaggaaattgaaaaataccactccagtgaacacatgagtggtaagaaagcgaatagccttcttgctcatatagagaaagttttagtggtctggacagaaggttcaaaccagccacaacattcccttaaaccaaagcctaatctcaagcaagcgccaaactctccttatttctttgaaggctgagagaggtgaggaagctgaagaagaaaagtcagatgctaggagaggttggtgcatgaggtttaaaggagagaagccatctccataacatcaaagtaaaaggtgaagcagcaaatgatgtagaagctgcatcaagttacccagacctagctaatgccattgatcacagtggctacactaaataacagatttcaatgtagaggaaacagccttacattggaagagatgtcacctaggactttcatagttagagtggagaagtcagtgcctagcttcaaaggacaggttgactctactcttagggctaatgcagctggcgactttaaattaaagccagtgctcatttagcatttcaaaaatcctagggctcttaagaattatgctcactggtttcaaagaacttcttgactactgccttaatttcattatttgcccaggagttattcaggagcaggttgttcagtttccatgtagttgtgtggttttgaatgagtttcttaatcttgagttccagtttgactgtgatgtggtctgagagactgttatgatttcagttcatttgcatttgctgaggagtgttttacttccaattatgtgattgattttagagtaagttgtcttgtggcaccaagaagaatgtatattctattgtttttgggtggagagttctgcagatacctatcaggttcacttgacctagagctgagttcaggtcctgaatatccttgttaattttctgtcttgattatctgcctaatattgacagtagggtgtttaagtctaccactgttattgtgtctaagtctcttggtaggtctctaagaacttgttctatgaatctggctgttcatgtattgggtgcatatatatttaggatagttagcccttcttgttgaattaatccctttaccattatgtaatgtccttctttgtctcttttgatctttgttggtttaaaatctgttttgtcagaaactaggattgcaacccctgcttttttccgctttctattttcttggtaaattatcctccatccctttattttgagcctttgtgtatctttgcacatgagatgagtcccttgaatacagcacactgatgtgtcttgattctttatccagcttgccattctgtgtcttttaattggggcatttaactcatttacatttaaagttaatattgttatgtgtaaatttgatcctgtcatcatgatgctagctggttattttgcagacttgttgatgcagttgctatatagtgtccttggtctttatattttggtatggttttgcagtggtttgtaatggtttctcctttacatagtgcttccttcaggagctcttgcaaggcaggcctggtggtgactaattccctcatcatttgcttgtttaaaaaggattttatttctcctttgcttatgaagtttagtttggctgctttgaaattctgggtttgaaattcttttttttttttaagaatgttgaatcttggcccccaatctcttctagcttgtagggtttcttctgaaaggtctgctgttaatctgatggacatgaacagacacttctcaaaagtagacatacatacagccaacagacacatgagaaaaagctcaacattattgatcattacagaaatgcaaatcaaaaccacaatgagataccatctcatgccggtcagaattgcgattattaaaaggtcaagaaacaacagatactgttgaggctgtggagaaataggaacgcttttacactgtggctgggaatgtaaattagttcaaccattgtggaagacagtgtggcaattcctcaaagacctagaaccagaaataccatttgactcagcaatcccattactgggtatatgcccaaaggaatataaatcattctattataaaaatacatgcacatgtatgttcattgcagcactattcacaatagcaaaggcatggaatcaacccaaatgcccaccaatgatagactgcataaagaaaatatggtacatatacaccatggaacactatgcagtcataaaaaaaatgagattatattctttgcagggacatggatggagctggaagccattattctcagcaaactaactcaggaacagaaaacgaaacaccacatgttctcacttataagtgggagctgaacaatgagaacacatggacaaagggaggggaacaacacacactggggcccattcagggggtgctaggggagggagagcatcaggataaatagctaatgcatgtggggcttaagtcctaggtgatgagttgataggtgcaacaaaccaccaggacacacatttatctatgtgacaaacctgcatgtcctgcacgtgtatccaacaacttaaaattaaattaaattaaatatgctaaatctactctctttgtgctctataaatggaacaacaaagcctgtattaccgtatttctgtctgcagcatgatatactgaatattttaagcccactattgagacctactgcttaggaaaaagagatttatttcaaaatattactgctcattgacaacgcacctgatcactcaagaactctgatgaaggtatacaagaagatgaatgtttctctcatgcctgcaaaaacaacattcattctgcaatcaatggatctaggagtcattttgactttcaagtcatactatttaagaaacacatttcatacagctatagctgctatagatagtgatttctctaaaggatctgggcaaagtaaattttaaaacttctggaaagtatttactactctagatacaattaagaacatttatgactctcaggaagaggtcaagatatcaacatttaccggcatttggaagaagttgatgctaaccctcatgatgactttgaaagtttcaaggttgcagtagaggaagtaactgcagaagtggctgaattgctgcaatttcatgataaaacttgaagagatgaggagctacttcttatgggagccaagaaagtgatttcttgaaatggaatctacatctgatgaagacgctgtgaacattgttgaaatagcagcaaaggttttagaatataatataaacttacttgataaagcagtggcagggcttgagagaactgacttctattttgaaagaagatatactgagggaaaaatgttatcaaacagcaccacatgctacagagaaatctttcatgaaaggaagagtcaatggatgtggcaaacttcattgttgtattattttaagaaattgacatagccaccccaaccttcacaacccccactctgatcagtcatcagctaccaccatttaggcaagaccctctgtcagcaaaaagagtacaagttgctgaaggctcaggtgattgttagcattttctagtataaagtatttttaactaaagtgtgtacactttttagttacaatgccattacacacctaatagactgcaggatagtgcaatgtaaacataacttttatattcactgagaaacaaaaaaattcatgtgagttactgtattacaatatttgctttattgcagtggtctgaaactgtacctgctatatctttgaggtatgcctgtgtgtatgtgtatatatatgtatgtatacacacacacaaacacacacacacacacacacacacacacagagagagagagagaacagagattattttaagaatggcgtgaacccaggaggcagagcttgcagtgagccgagatcgtgccactgcactccagcctgggtgactgagtaagactctgtctcaaaaaaaaaaaaaaaagaattggttcatttggtcatggaagttggtgagtccaaaacgtgcaggatggtccagcagactgaagacccaaggagtggattttgcaactcaaatccgaaggctatcaactggcagatttccctcttcctttgagaacatcagttgtttttgttattgttgctcttaaggccttcaattctttgagtgaggcccatccacattatggagggtactctattttactcatttactgattaatctcatctaaaaagtagtttcacggcaatatagatatgtttgaccaaatatccaagtaccatgggctagccaagctgacatataaagttaatcatcatactctctgtgtagtgtctcatcatttagcccaaagaagcttgggcttctttacagcatagcagctggcttcccagggagagcaagtgggtctgtcagacctgggctcaggagtcccgggatatcattactgttgcattctattggtgaaagaaagtcacaggtctagctcatagctaaggggaagaaaactacaacctacttcatggtgtgaggaatagcatatgtgggcagggatgaggggaatagttggagactagctatcacaatcttccctctggccacagcacttcttgtcccttttcagaaagtctcatcacattacagtgctgggcccagcttcaaggtccaaaatcacataatctaaattgggtatatttaaagttgatgttccctctttatctagatacttgtacctaaaatgataccttctgtgtaatcccccttccctgcaacatacattgatgagacagggattgttgtatcgctagcaagaaagtcagccattcaaaaggagggaaatgagaggcacatagcaatcggtgcttcataaaaattctgagatccagctgggaacatgttaccaattccctcaaatctaggtttcctgaaaaggatcctgttctctggatgtggatttctattccattgttttcagtgcctgttgactctctcctctaagttaaccttccttttctgtaagaaatggccctcattcgcaaacggagtcactttgtgagactatttattccattaaaggtttggaggcctaaaatcttcttttcattttgtcctgtcactctcccttttcttccaaggtggcacagcttctttttaaactttgtaattttctaatgtatccagttatattccattccattgggcgaaagctatttccccaagtctctttaagacagacacttttcttctttagactgagagtcagaatcctgtgcagtaacgtttttaagagtttaatcacccttgtctcctagcagagtggaacttataagggttttaagaggtatcttactaccacattcttgacttgatatttaccctgaggccacattgtactagcagtacttgatttgatcagagaccattttttactctgaaaaccttctgccatctggaggggttgagaatgagaaataatattattttctaagccagcaagtcctgagttggactttgtggattaaaataacagtttcctatttctgatgggtaggattttcctgagtatgtcttctgctccatgtggtattgattaggtaggtcacttacgtggctacatttagtcaatagctggtctgggctggatggtccaagaaagtttcagtcatatacctggcacctctgagcttttccatatggcctctatgtggaatcatcttgggcttcctaatagtatggctgattcagactggtcagacttttttttttttttttttttttaaagtggagtcttgctctgttgccaggctggagtgcagtggcatgatctcggctcacggcaacctccgcctcctgggttcaagcaattctcctgcctcagcctcctgagtagctgggactacaggtgtgcaccaccatgcccagctaatttttgtattttttagcagagatggggtttcaccatgttggccaggatggtctcggtctcttgcaggctggtcagattttttatatggaggctgactccaagggaaggtgttttaaaggaacaggcctgcccaatgtgcaagcacttatctagcatttgcttgcataatttttctaatgtgccaaagtaagtcatatggcaaggccaggatcaacatgggagaaactacatgaagtggcagtgccaagaggtagcatttattatgggtcacccatataacaatctctcacacagagtagtttggtagctggacagaaataaatttgtcatcttcttgtaccttttactagtagtataacttagggcaaattgctgtgcttctgggattcttatttgctgcttgtaaaatagaaaacatgacacagatgctactagatctttgtgacaactgtacacacatatgcatacacacacacacgaggtactcacagtggtacttaacaatggctactatgttttaatggtgtacttggcagaccagcagttaggttttgaatggactaactgtggttttatcatatcaggaccaggttgtaatcagaaatcagcgcttgcatagctcaaggtgattaaaggtaaaaaggttaaaagttgagaagaaaggttggtgttagatactattagttcttggccaaaagctgttggccttgggagaggtggaagtttgagatcagggatcacagttatatgagaacacacagtgatggtgaagtttggaaccagaaaataagtcaggattatacggggtccaaaaaagcggagtcagggcactcatgaatctaaaccagatatagaagcttatggagtcagagagcagaaatcagggacacaggcaagaaatccaggaaaacaagaattagatatacccagtatgttgagacaaatagctatggggcgcagaggcaagagaaaaatttggtagtttggagccattgtctccaaacataattatagccaaaagtaaaacatgttcacagcatgtgggcagatcttgagccataggtggaaaaagacatctggttagaatacgatggcagcaaattggtagctcctgacatgcatcagaacccctttaaattttcatgggattcaggttgttccttcaattatttcaatgatctaatctttaacttcttgagaatatgatgttttcctaaaaaggggactcccacacagaaactgtcaggctatgaagctgtcgatggcatttgtagtactcacacagttcaaaaaaatgatgctatctctgccatcttttgttccatctgtagaatagtccattttttttggttatagcagtcgtcttccttgaatggttcctacccagagggaaatcggaattgccggtactcctatgtctcagttgcagaagtcaggattttttctgaatcattctgagcatcttatctttcctcatgctgattattatttcagtctgaaagcttatgctctcttataaagtcacattgtactttcgttttccattgaaaattctgaatagaataaaatgaaatcatttaaagtcatgtttaagaaaagtagagtttcttgattaaaaaggagaaatttagagtggcattcaaaagaaatacattaaaaggaaaaagtagcatgcactcatgcagttcttgttgggaggatagtttcttttccttctcattcggcccattaaaaagttcaattaatttcttttaaagatttcaattatgaatgtatcttaggcattgatagggagtaatttttagatctgacttatttttatatattattgttcatttttatagcttttctgagattcttggcagtgagtcagcacacagcatttctacctatagtccaatttatatgagtcctactttcatgcaccactgtgatagtgatgtctcggttagtggctatcatggtcagtagcctgaagatctatagcatctacatatttagaatggatttttaatgtctatgagagcctttatttctccactacccggttcctttgtggatcctgagtctgaggagaacataactgtcaattagaaccactttttaagaattgctgtaattaagatttttgatgaccgagttattaattaggaaacagggtctccatattttgctctgctgcttctttatgtcctagagcaagggtcagcatacttttactgtaaatggcctggtagtaaatatttccagctttgtgggccacatcatttctgctacaaatactaaactgccatgtggtacaacagcagaaaaggacctatgcatagactgctgtttttaatgtcaatatagtatcagtagaaaagacagggcttaataaaaactttgtgtaatatggtctctttggcataaaattaagaaatgtatagaagtaaacgttgttacaaaaacttttgcaaatgtgtgtcgcttttcccagcactcacgaataacagtcatttttaaccagacttctcgtttttgccaagtattatttgttctcatctagtaacagtctaggacaggtgtcagcaaactactgccacaggctaaatcctgcaccttgtcttttcctctcatgccacatagatattcaaatgaggaatctatgcacaggtctttgacccacccatcagcagaacatgccctttctggagctccatttctcactctcaatagtgctgaccacttaggaggagctgtccatgttcttttgtttgaaattctctatgaaaaatgacatcttttctgaagtgattgctggaactaatggggccttttgtgtttgcagacctgttttcctcagtgaagctggcagggactggtaaggaatcagaattacaatcttgtctttattagcactgtgtttgcatcagtcctctcctgagaaacagtgcaggttgagataaatttctcctgtgaagtgatacaattcattttcatctcacatatgcatggcctttgtgccatgcagaacacactttttactgttgttgatgtaagtgagatgttattaagaggttttagtttgagtttattttagataataccaataattgaatgctttactagtgtttactacaaaggtttaaaaaatcattactacctataaaactgagtaaaataaaaatgatttagaactaaagataatctcaaaattgcacattagatagctatcctatgttgtagaagatattcagtctgcatcataatatttgaaacaaatacaacatttcaccataagacaagagcaaaatgcacaaagaatcgagtgttccatgcaataggctttatgaacacaaagcctgtggccaaaatgaggcaagaggaagtatgaggggtacacagatgtcatgtgcagtaccacataccacccctggggagtgataaacttttttgtgtatttgcatttgactgatttttactttgtgaaaacataatgtgctggggaaaatcacatctgaatccacaaaatgtccatggtatattgacatgtacccctaatttatcaattttgtatgaatgtatttgcattagagaaacatgtttcagaatacattgtgctttgcaagtgtttgcactgttgcaaactatgtgctttatctcactgaatcttcacaattactgcatgcggtgggcactattttcatgcctgttctacaaatgagtagacatataaaagttaaataacttgccagtggctttgaggaaatacgtaacagtatattagagatgggattgagttattctaattttcaggaagaagaggaaagtgaattctccccacttatgtccttagggagtaggacattaattgtatttcttttagttctttttgcaaatgttactttcacagaggcttctcatggatccctatctaaaattactccccattctatagacttttgtttaaaaaaaatagaggccacaatgtacatactccaagaccaactgccattagccacataaccaaaatttaaattatctcaattttctccaaaatactaggtctaaccataaacaaaacgtgaaatgtgagcttttcatccttgtcaacatgactcagtaaaattaaaccaatcagctgcagacaaatcagcttaaacagttttacttgtcctaaaaggaatataagtttatgatagccaaccacagcgaagacagatgcagttccttaattatgctttataagctgcattttaaatgctgtgaacagagcttcttaccacttttgatttgaggtccctggtttgcaaactgtccttttgtatgctcaataaactttaaaaaatttttctaacttgatctgattttaacacattctatctactttagtgctttttatatcctaaacacatgacgctaacattctatatagctcacttgtttatactgtttattttctcttcccctacactagtgaaattctatgaaggcaggaatgtttgtcattgtcacactactgtatttccagtgcctaatataggcactcgataaataattattgaatgaatgaatcaatcaattgattaatcttaggaaaagttctttaatggatcttaaaaaaaaatcttgtgagcctttagaaaggaaagtgatgatcacctggagcttgtattaggtcactaatagtaaagcatatcagattaaataacttacttttcccataagaccagtgtatctgaggagtgctgctccccctgtctatctgaatttcaacgtttgataaaaaccttccatgatgaacttatgcttaagatgtaggaaggcagttgatgatactgttaggcagagtaacagctgaatgcctgtattcatgaatcaatgtttagagagagacctctagtaattggctgaaggatttggtcttcacatttcctgttcaccattttcattgttaattttgagggtggtattaatggcataaggagctaatccacagatgaaataaaaatggcaggaaccactaatatggctgttaacaaaatcagcatacaaaattacttgacagactaaatgggagaggtaaatataataagacaaaatactaaaatgaaaatataaagtctaaaacaccagagggaagtaggaactaatgttgtttgaggagcaataggagcaaaggtgagacatagtttaataacaactgtaggtttaggtggtagttacagaagcataaatcaataatatgacattattccccccaaatattcattcattcttgggtttcatgaatagaactgggtttagaatagaaaaggtaatgatttggctgtaaatttatgttgcttctcccatagctagagctatgaccccaatcctgggcaattcactttaagaactttgagaagtagtgtacacctaaaacttgcaatcctcatggaaagatgagtccaaactgtgtcacgtgaagaatacctaaagctgtggttccaaacttatggccttcagatgtgttctaaatggcccatatggggtttttagaaatttgaatttgcggcagatgtttcaaaattagtagatgtctcattaaatatagatttctgggatttactcttgctactgtgagggtgtgtgatcctgtgtttgtgttcctctcagaccactttactcatttactttaaatttctggtgcctatagcaatcggggtgctaacacccggggggataaaaaaggactggggaattcatggcctgtaaaacaaggttggggttggagagatataaatatatctggagagctttcatagggcagagcaattagacccaatctttgtgtccccaaaatgttaaacactggtattaataataagaaaacatatttccattaaccatatagaataactatcttatagtgacttgagactggctattttattcatcttttgttcatcagtaccgagaagagtttctgacaatgtttgtactcagccactcttaactgaataaatgtggcaaaacaggttgcgagtggtgaattccattccaggagcagctagaatatatgctctttgagagcagagatctttgtcaattttgtttacagctatatcagagcacctaaatcagtgcctgccatgtagtaggagctaattaaatatttgtagatttcataattggagatattcaaacatagaatcatggtctacttgtcagtgctgtaggaaaaagtaattaacaatataagtagagggtcatgaaacaagggaaatactgaagtagatgacatttaaagttactgccaaccctgaaagcctatcagacagtgacatagaatgggattatgtattttacattaaatattaagcatagtaaagttaaagtagtgtaggtatgtgtggtaacaaaactgagaaagcagtttgccagttatttatttatggtatggacaggaaattattggctagatttttaaatgaaaatatccaatagttgagatttttctgatatttaactatatcttatatcttatgtccatattgatgacagtgattattccattttcaatcgttttgtgtcatctaagcagcagttaatcattcctacgtgatgcaaatatacttttattccctggtatttgtaatttaacttacaaaacacacgttgccttgaggtttggcatgatttgttattctatccttcaagaagacccatgataacaaatcaaatcattgagaactgatttcagttttcattgtttggggtggtaactgaaggtgacgttttgaaaaatcatactataactaacctagaaaataatgttcagaggccaacatgtggcaaaggaacacatagttaagtatatagtttttaatagaaattctatgcaccttttattgtgaaggtctagcattttaatattttcaaaatccagaaagatgaaaaatttctttataaacttgaagggaaaataaaaagtctaaagccctgaatttgagttctagaaatgaatgtatttaaaatgcagtcctgaggtgctgtatgctaactatgtaaagcaatagcttattaaattcttggaaacttgctgtttatttgaaattggatatggtaatagatttttgttaaatgttattttataagggataacattttctcctgcttagtttcaggaaaaaagaaaagaagcacttaatttttaaaaggttaatggatacttaatggttggattagacctatgcatcatcatgtttacagcacagaacaatgggaaaaatttctattatggagcagtgccacataaccttaatatcctgtatcatcattatcatcattattatgtgttgagtatacaagcgtctatctctgaggaatacttagcaatttatgaatttgttttaattagttttctcagccttctcatagggcatgggggacatattgcttaaccctagttttagagccagccttaggtaaaatggtgatgcaaacactgttttactttggtgactcttctgcttgcagggatacctcctttttgcacagcaccttatttctccttctgtaaactaaaggagaaaattattatacatttttatacttaaaaatacgtagttgagaatttcaaatatatgcaaaagtacagagaatagtaattggttggcgcgaaagtaattgtgtttttttgccatttaatggcaaaaaccacaattgctttcgcccaacctaatataatgcatcttaaatactcatcacccagttttaacaattctcgatatacaactagttcttgtttcatctgtacctttacccatatttccttcctctacaattattttcaaattcaatacacaatatttcttcatctgtaagtcctttagtatgtatctaaaaatagtcttttaaaaattacctcaataacattaagatgcttgtaaattttcctaaaaaatttcctaataatttcttattatcaaatgtagctgatttttaaaacaattttattaaataattttaatttttggtatgaaatggtagcaactaaggttaacagatcgaaatcattatgtgtctgaattctcttttacactataaatttcctctttctatcctttctctctgcacccttttaaaaaaactgggtcatacatcttacagagtttctcataggttcaattttgctgattgtatctctattgtgttgttcaacctgtcctttgaattttctataattattagttaaatctaaaggcttgataaatgactaatgttttattattttgagaggataagcatattttgttttttgtttccccagctttattaaggtataaataataaataaaaattgtatatatttgaggtagacatgtgatgacttgatataggtatacattgtrtaatgattaccacaataaaattaatcaatgcatccatccctataaatggttaccttattctatgtatgtatgtgtgtgtatatgtgtgtgtgtgtgtggtaaggattaagtattaaggatacttaacatttactctcttagcaaacttaaacaatacagtattattatctattgtcaccaagctgcaatattaaatccccataatgtatttgtcttataactgaaagttagtatgctgtgtccaacattaccccatttctaccatgtcccagattctggcaaccaccattctactctctgttcctatgagttcaactatgttagattacacatataagcaagatcatacagcatctggctgtctgtgtctggtttatttcagttagcataatgtcctccaggtttatccatgttttctcaaatggcaggatttgtttttctttttactgttgaataatattccattgtatatacaccacagtttctctattaattcatttgtcaatggacacttaggttggttccataccttggctattgtcaataatgctgcaatgaagacgacaagtgcagacatctcttcagcatgctcctttcatttcctttggatatatacccaaacattagagtgctggatcatatggtatctctatttttaattttttgaggaatcttcatactgttttccataatggagttaccaatttacgttttcaccgcagtgctacaagcgttcccaattctccacatagtcaccaacactttttatgaccatcctaatgggtgtgagaagataccgcattgtggttttgatgtacatttccctggtgattaatgatggtgaacaccattttatataccttttggccatttgtatgtcatctttggagaaatgtctattcaagtcccttgcctatttttaaaatgggttattggagtgtttgctattgagttgtaggatttttttgtgtattttgaacatatcaggtacactcagccctttgtatctgtgggttatgcatcaagggattcaattatctgagaatcaaaaatatttgaaaaaacataataaaacaataaaaataattaaaaagtaatatagtataattatttacatagtgtttacatagtattagtattataaataacatagagatgatttaaagtatgcaggaggatgtatgtaggttatatgcaaatactatgctattttatatgcaggacttgagcatctgaagattttggtttctgcagagggtgggaaaggttgaaccaatcccccatggataccaaggtaaaactatgtatggtttgcaaatattttctatcatccatatgtagaaaatatttcattttgctgattgtttcctttgctgtgcaaaagcttttaagtctgatgtagtcccatttattttttattttgttgcctacacttttggtatcatattaaaataataatcaccaagaccagtgtcaagaagctttccacctgttttcttccaggagttttgtggtttaatgttttaatttcttttaagcacatttttgtattgtatgtaataaaatatggatacaatttcattcttttgcatatgaacatccagttttcccaggaacatttattgaagagactattatttccccattgtatattattcatgcccttgtcaaagactaactgattatatatgcagggtttatttctgggatctctattctgttccattgttctgtgtgtctgtttttatgccagtacctcactgttttgattactatagctttgtaatatagtttggaattagggagtatgacgcttccaactttgttcttcttcttcttcttttttttttttttttttttagatggagtctcgctctgttgcccaggctggagtgcagtggcatgatcttggctcactgcaacctctgcctcccaggttcaagcaattctctgcctcagcctctctagtagctgggattacaagcacctgccaccacgttcggctaatttttgtatttttagtagagataggatttcaccatcttggccaggctggtcttgaactcctgacctcatgatccacccacctaggcctcccaaagtgctgggattacaggcgtgagtcaccacgcccagccattcttctttcttaggactgctttgggtattcagggtcttttttggtttcatatgaattttacaatggttttctctatttctgtgaaaaattccattgaaattttgataaggattgcatttaatatgtagatcccatatggacattttaacaatatgaaatctttcaatccataaatatgggatatattttcattttcattaatgtctttaagtgtagagatctttcacctccttgggtaaattcattcctaagtattttgttcttttagatattattaaatgggattgtttttcttaatttattttacagatagtttattgttagtatatagaagtgcaactagttgctgtatgttgattttatatcttgtaaatttgctgaattattttcttaattatgacagttttttagtgaagtctttagagtttttttttaaatatagaaaatgtcatctgcaaatctaatttggatgccttttatttctttttcttgcctaattgctctggctagggctttcattactgtgtkgaacacaaatggcaagagtaagcattcttgttttgtttcagattttagagaagcagctttcagttttccaccatttagtgtgatgttagctgtgggcttctcaaatatggcgtttattgtcttgaggttcattccttctattcctaatttgttgagagtttttgtcatgaaaggatgttggattttgtcaaacactgtttctgcctctatggagatgattatagatcatatgatctttatctttcattgtgttcattcggtatattacattttttgatttgtgtatattggatcatacttgcaaatctaggataaattccacttaatcatggtgaattatatttttaatgtattgtcaaattcagtttgctagtattttgtttaggacttttgcatttatgttcaccagggatactgccctgtaattttttttcttatagggtccttatctgattctggtctgttggtaatgctggcctcataaaatgaatttggaagtgttcccttctcttcactttttttggaagagtttgagaagcatttgtattaattcttaaaatgcttgctacaattcacccttgttgccacatggtcctgtgcttttctttgttaggagtttttttttttaattatggattcaatcttcttacttgctattggtctgttgaggttcatgtaatatatttccctatccctttgctttcagcctatgtgtatccttaaggcttaagtgagtctcttattgtcccaatatgagacagcattttgttggattttttttaattcattcagccactttgtgtcttttgattgaataatttaatccatttatatccaagattattatttataggtaaggagttattactgccatttaaaaaattgctttctgatgggtttgtggttcttgtgcttttttttgttgttgctgtcttgtgatttgttgatattttgtagtggtgtgctttgattccttgttgtcttttctggatctattagagtttttttttttttttcctttgtaattactatgggactttcaaaaaacatcttgtagcatcttttaattataatattttattttaagctgatgacaagttaatttcaatcacatacaaaaactctacacttttactttcccccgtcattttgtgctactgatgtcatgctttgcatctttttgtattgcatatccattaacaaattactgtaactatggtttatttttaattattttaccttttaacttttattctaaatttagaaataatttatacatcaccattaccacatgcaagtatacagaatttaattatgtatttaccttttccagtgagttgtatacttatatatgtatttatgttgttatttagcagcttttcattccaacttgaagaatcacattagtatttcttataaggcaggtcttgtggtaatgaacatcctcagtttttgtttgtctgggaatgtctttacctctccatttctgaaggctaactttgcagggtacagtattcttatttgacaggcttttttctttcaatgttttgaatatattattccatattatttatttgttatccatgtaggcttgcattggtgtctgtgaatttgaagaagcaaacagtctttcggtctttacaggctgattttaacaaccttctcttccaccaatggcagacctgttattaggtatgcagataggcgtggttccctctgggtttctggaggactccccctggctctctgagtatgtctatgggtagggagaaccgtccccagatcaacatgagagagcttggaactaagtcactgctgcttcagggtccacatctgagaggacttgcctccagggagttggatgggcatacatctctggggacaagattgaccttgggccaagtctaagtgggaatggagcaaagttatagggccatctcagaatctgctgtggaaccaagtttggcaagcctgtctccgagaacatggatgggaatgagtcctgacaggtcgctaagtggagacaggactgctctcaggccacagtttcagttttaggatatcatagttagcagacagctctatacaaaactctactcctttatatctctgcccatttatgttatcaatgtcacatattacagctttttatattttgcatttgttaacatagttttatatttatattttataattaagttctataccagagttaaaaataatttatgcaccaccattgcaatattatacgatttttatttgtctaaatatttaccttttcctttgtgttgctgtctagcatactttgtctcaactcaaaggactccttttagcaattcttgtaagtcaagtctagtgctaaagaactaccttagccattgtttatctttatttctcctccattttcaaaatacagttttgccagaaagagtatgcttggttgacagactttttctttcagcactttgaatatattgtcccactcccttctggcctataatgtttctcctgagaaatctgctaatgtcattgaaggtcgcttgcacatgatgagccattttctcttcctgctttcaggattccctttttgtctttgatatttgacagtttgattataatttatgttggtatgttggtttttccacgtttgagttttatcagtgtcttgaatttggttgttcatttccttcctcagatttggcaagtatctagccattgtttttttcaaataagctttctgtccttctctctttctatcatctccttctcagatttgcattatgtgtatgttggaacacttgatggtgtcccatatgtttcttagtctttcttcacttttcttcattcttctttttttcctctttgtatctctggcttcataattttaagtggcctctctttgagttcatttattctttcttctgcttgatggagtcatctgttgaaatgctctagtgaacttttcaactcaattactgtattcatctccatgaatgtttgttttctttttgaagtttgttgatattctcattttgttcctgcatcattttcctaatttcatttagttttctgtctgtgctctcttctagcacattgaacttctttaatattatttttaattatttgccaagtaacataaatttttatttctttctggttggtacctggaggtgtattttgttcctttgattgtgtcatgtttccctgtttctttgtgtgcctagttatttttttctgtgatttgtgcatttgaaaaagcagccacctcttcagtccttataaattggcttcatacaggggaagacttttaccaattagcccacatagagattttgggagcctctccagttttgttttgtttttttttttttttaccacgggatacatcttctttgaatttgtgtgtgttctttcccagttagagtgatttgcttctttttcttccaagagcttttaatctccttctccgtctggtgtctgtctgtaccactgcaggttctgtggcattgcaataagccactgagttaccttttgctctctgcagaccccaggcatccaaagtatgtagattccattagtgctctgaatcaggcaagacagaaaccagtctctcagacaacactctgaaaaaccagaacattggacatacattccactcttctctttctctcctaagggagaagtcataaggtgtgatttatttttcctgatgacaccaagctgtgctggcttggaggaagggctgtcatggttgacgtgaaatgccttttctcatctgtttcaatgagactattattttctttaagtttgcctcaggcactgcaacttcttgactggtttctagacttttcataaaactttttggatcatatattattgctaagttggcgtctctggtggagaattagctctctcgctgatgaaactctacagaatacttttacagtatttaatattgctcttatttcatctcacacgtacatagtcactttcctaacacttatataattgttctcttcccaatagctagtagtgtttcctgtaacacatattgacacatactaagttcttatataagaaaatatttaagggaattttgtatttttccactaaactttctgttgattatttgaaggtaccacacttttggttgttattgtggcttcatggtaaaattttatatgtattagagcaagaccgtaaccatgttatattttataacatggcctaattcctccaaaaagtaaaataaaaaactaaaaaagagatgattttcttgcaataacattaaacttagaaaattattcaaaggaacatcagtcttgattatataagtcttggaaaagttgtatagatttcttaatctaagttctacttatttctttctgagcttatttttaaacattttggttttgtttgtttttataaatgagatgttggtgtggtaattttaacaactggtctttgattttataaataaaagccttttgcatattttactttaaaactggacaaacttacctgactattcttattttcaattatttttcagttgatttttctgggtttcctacattaaactaggttgtaatcaaataaggataaagttgccttcacttttcttatagttttatgcctcctatttctattcctcacattgggttactgaatttgttagaggtttttgaaaaatgggggcaatgttacatttgggctaaaactatgaacattgatatcagctaaacctggtctcaaaactctgaaggatcctcagttagaactgagaggtcttaaaagacgaggtggctagagggaggtctgcacacacattgccatgagtcctcagaccacatgagacattcttttttgtctgaagcaaggctggagccaggcctagatggcctgtggaaagctcccatggaaccagcctgctgttctcattccaggcaaactaacctctgtacagttgatagtgtcactatggacaaactaacctgtttaagcttcatttccaaatctgtatcatgggaatagtaacagttttttgtacagtttttataagaatcaagtagctacctatacaatatatgtaatacaataaatattactaagtttctattattatcctgatcttaagcatgaacctatgctttaccagtagctataatgttaaatataagtttaatataaacattcttttgatccatagtttgtttatcaaggggatattttgtagttatctgaatatcaaagccaaaagcaaagcaacatttctggctctctgcatgtggaaagggaacttagctttactttgtctcccctttcctcccacagcccaatatttgttagtttattctagatttacatacccagtttatcattataaatatatcatcacttaaatgatggttttaggtttttctttcatgtttatacacatagttttgattggtattggtatttaaataaaacttgagaatgaagacaatagatcctttgtatttcttttaaggttgtgatttgacccctggttcctcaagtgagaaacttttcaaaacacttgagagagtaaactggctgagttttacctatacttactgtaagacataatttttagctgctaaaaaaacaatgttagtttcttttctacacttgggattctattactgtatgtaactgtgaaggaaataattgacagaactcatgtttttccttattttttttccttcctctactaacaaaatagaattgactttattttttaaagtcagccaggaaatgtacaatgctatttacaaaaggttaattgaatcctagagttgcagatcgagtttcttgttgatgagaatatacagtagaatattactgaatgagagatttttctattccttttttggaaactttttggaagttttgatgactgagttataggaaattggctttagaaggacttcagtgatttctgtctcttctaatcagtatgaaatcacagcctatatttggattatgctctgtgaatgtttgaaacctatctgttatctttgtgttaacctgaggtagaaattttcatttttatatagaattagttttgcaagagtatcttttctatatacaaatatccatttgaaaattgattgtgttaagtcgatacaatgcccttttctatattaaaggacaggatgtttattgccttgacttgtttgtttcctgtaaagttatttgggcaataatagcattcagttttaagataaaacatacataataagtaatgagacaagaggaaaaacatttggcataaggcttagagaaatttaaggctcattttccattattgctttagtgcattattaacaatttcatggggacatgaaagactaatatatggagaaaatgtctgctattggcatataatatgttaagattgcaaatatgacttttaatccactgtgataatagcctattaaattgtatcctagtccttgaagagtcactaacattatcttgtttatactacaaaattaggtacagggaaactttacttttacagaacttaatgttgcatcaaactaactggacaggaaaaaaaaggaatgtggcattggaagtgataaaacaaaacacatcctctgcctatgactgtcttcttcctggacctatctgactatttaacatgctgacctttacaatgctctgcatagtgtaggctcactgaaagcactgagtgtctgaaatccttcattcttatttaaaacaaaataggtgaaaatacttaatcatgatgtctatatatttgaaagaatatttgaacatggggagagacccaaccagtttgagtggctgaagttttggaatttttatagaaattccctattatgtgtttcaactttatgcctgacttataataatagttacaaatactacattgctagtaacaccaatatctaataccatttcctctttcctaatttcttgcagttgaagaaatggagatgagtatgtctatatgcttcactctttcctcagcaagatttatttagcatatgttttgttccaggcactggctaagtgctaggggtacaaaagttgttttgtctcccttccttccagatgtgtccatgtgtccaggctaacagagtgagtagtcacacaggcaaatcattctcctacagttgtcaggctgaaggctgacttggtgtcataaataaaaaggcagaagatatttgtattcattgtcttggatgatattttcaacttgagtaggcagattgaaaagaaaaatgcggccgggtgcagtggctcacacctgtaatcccagcactttgggaggccgaggcggtggatcacctgaggtcaagagtttgagaccagcctggccaacatgatgaaactccgtctctactaaaaatacaaaaaattagctgggtgtggtggcaggtgcctgtaatcccagctacttgggaggctgaggcagaagaatcacttgaacttggaaggcgagggttgcagtgagctgagatcatgccattgcaatccagcctgggcaacaagagcaaaactccatctcaaaaaaaaaaaaaagaaagaaagaaagaaaagaaaagagaaatggttgaaggatagcagcttggacaatgcctaggttttaaagacagttaattgaggagccagcaatgagactaaatgaaaatgactggagaagcagatagacagaaagcaaaaataaatgtccaatttatggggtgatctacatctttttttgtctgcaacagtccaggtgttctctttttgtcgatgtcacaactggctagcactttctttcaacttgcaaaagtgttatgtactccagtaaaccctaagttctctgttacagctttgatcatatactggtgattatctgtctattatatttttcctcaaatgaactgtaagtgcttaagcaaaaggaggtgcctaattcatctctgcattttcagtacccgacacaagcatcaaaggtagtaggtgctcaataaatgattaattgggaaattaataggaatggaaacacaattaagataggttgaactcctttagagatatacacataaaatagtactacctgtaacaagaaaatgctaaatttttgtggattaccccaacagaagattatctgtggctcgtgtaccccaaattaagtgtttctgattggcaagtgtctctcatgtaaataatgattaagaaaccatggcttcttccatcttgtgactctaccatcttcaacacatggtgaggggctacagaggggaagagaaatagggggttgtactcacaaaatttttatgtggcaggcctgaaagtggcacatacacagacccatacacatttccttaacttataatcaatgagcatgtaatgtaacactcactgacatctctatagctacctgtaagggagtctggagatgtggtctcactgcatgccaagaaagaaacattctttcctgcaatgcctatatatgtatatgtataaatatatatatgtatatacatgtttacatatgtatgtatatatatatgtgtgtatacatatactgtatgtgtgtatatgtatatatacacacacacacacatcttaaggggattttcttatagaaattttatttctcccccctctctatatatatatgaaataaatatcagagactgtgagattattaagaaccacagaaatttatttaaccctagtaatgtgcatgcctgtgttttaaaggccattaagtagtttattgtctacttttgaaagaaaaaaaattaaacaaagaaattaattaaatatcttggataaaaactgaaacaaacaaaaaggaaaataataataataaatttaacattcatccattgtaagtgtcaattattatggaattgcttactttaggcatgtatttcagaaagaattttatgcagtaaaaagcataacattaaagttatttgtctgtcaattattccatataagttggctaatttttgaatataattttattttactacaaggtagcaggttcatattacagttatttcaatatgtgagcatttcttttattttgatattgcatatcttgaagccgaatatatttctaagtcccatcaatagcaaggtgaatgttgtatcattttattattatgacttttattatacttttaaaattgaaaaacaagacatctttattatagggaatacagaagctcataattaataaagatactaaaacaaaattattaccaatattgcacaggagagccattttagagaattaggatacatccttaaacaattgttttatgaatataatatgtgacttttttgttttgttttgatattattgttttataaaaatgggagcactctataatctgttcttcccactcaacattgtgtcattaacatgattacgtattcttctacattattttaacagcctcatagtatttcatcatatgatgtatcaacatttactaagccaatccttcagtacagcaattagattacatccagttatttgctattataaatgagctgcagtgaacatctttgtgcctggatatttgccaaacagttttattaaactatgtctaaaatgtcaaaaccattagttctcaaactttaatatgcactggaatgatactggtgacttattcagactcataagccctactcatagagattgtgtttaggaagatctggaataagacccgggagtctgaattttagcaagcaccatctatgattctaatgcagagggtttgaatgtcacattttgagaaataatgacttggagacattagaaatactatcttttttccatcttctccctgccataatgccattttctaacaataacataagatacttattgctctggtgattagttttacatctctctccaaaataaaggcatttaacctcttaccttctacctgataaggttgttctttttatttctgaaccataactgatacacattgatctagagtgtgaaaaaagcctcttatactgttttggaatggaaaatgttagaatatagccctctagtgctttatcatttttattgtaaagataaaagtatttatagaaagtgggtttaaactaacagagtataagcatgagtgtaaacttcatttttagtagagataattatctcaaaaaagttacgtcttgaggcagttttatctaaaaaagaatgtcaaaaacattaagtcattcaacagataacctcagttatataaagcatttttgcaattgcaatgctaacacccagagtaggcagctaaatgcttataaaaagatgttaactttggccagctatatttagtgctactgaagctttgctagactcatcctttgttcttcttttctatgttcatccagaagaagagtatttacacatgtattagtcagggttctctagagggacagaactaataggatacatgtatatgtgaaagggagtttgttaaggagtattgactcacacgatcacaaggtgaagtcccacaataggcggtctgtaagctgaggagcaaggaagccaattcgagtcccaaaacttcaaaagtaagtaaagtggcagtgcaaggatccaaaaacccatcactctgtagaagcatgttgtaacatttgatgattctataattctcatcacactcaaaagtaggaaagctgttttcagtctgtggctcaaggcccaagagtccctggaaaaccacttgtgtaggtccaagagtccacctgtttaagaacaggagtctgatgatcgagagcaggaaacatccagcacagaagaaagatgcaggccagaagactccggcattccagtccttccatgtttctctgcctgcttttaacccagctgtgcttgcagctgattagatggtgcctacccacatggagggtgggtctgactctccctgtacactgactgaaatgttaatcttctttggtaacaccctcacagacacacccaggaacaatactttgtatccttcaatccaatcaagttgacactcagtattaaccatcacaacacataagtcattaacttaatcatgacctgtttccaatccaggaatgaagttctgttcttagaggaacttcctaagtacataagtacacagaggctcactttcccaatctaaaagctaagactgttccaagtgcatatgctttctgtttttttctatatttgttatctcacagaaacattgatttgccattggttcttgcaaaatcagtattttataactggaggtggtgttaaggtttattttgtataaccttttgattttatccctatggagactaaagaccagcaaggttaagaccagcagatctggaacaggttattatagaaatttgtatattatgttgttgctagcaaatggaattattgcaaggagatgatggaaaagatagtatttctgatatctccaagccattgtttttcaaaatgtgttgttcaaaccctccgcattgggatcagaggtggtgcatactaaaattcagactcccaggtcctattccagatctgctggtcttagccttgcttgtctttagtctctgcagacaaaaaatcaagacattatacaaaataaaccttaagaccccttccagttatgaagtactctgattttgtaacaaccaatggcacctcttaagaccacctgagtaattactggcagagcaggggataaaatttctatcctctcatttaatgacagattgtcattcatttctaatgtttatgtagggctgctctcatctcagttctgtttaatttttcaaatgaaaatgtgaagcttattgagttatgatcaattagtgtgtgttctgttattttctactaatactcactctgccagtgactatacttgttaaggtagtgcagcatggtggcttttagctccagttttaactagaagagatttgggtttggatcctgacatgtagggtgatcaatcatcctggtttccttgggactgtggggtttccctggacataggactttgagtgctaaaatcaaaaggtcccaggcgaagtaagatgattaatcaccccactagccatgtggctctgtcatgataggtctctgggttttttaatgggtaaaattggaaaagcaagaagaagtaactcataggattttagtaaaaattaaatgagacagtatatgtaaaacacggcactacttaataaagactcagtaagtattagtcattattattgatgttttataaagcaagtagattcctcaaagcacagattctcagaatttaggatttgaaataaatgaactttctttttagctttgacctctttttttttgtttgttttttaaatcttctcagtacccttctgtcgtcttgtctatacaactggacaatacaacccaaggttggatagagtccaccatctcacatccttttaccttttttcaagatataaatcaggaagacaaaaattttctatttgggaatcaatgtgaagagtgagcatcaaagacagcatagagctatggagaaaggggaaattagcctggattataataacagctgccattttgttgagtgcaaactctttgccagatattggtgcttcaaatactttatatatttggtccacacaatgactccgagaggtaaatattattatctcagtcttcagatggagaaacaacctcaatgagcctaagtgacttgcccaaagatagttgtatagtaaggagtgtaataaatgaggtctggatgttccaagctcgatgaatgtccaactttcagccagctggttaattttgagaaatataaacttcttcacctgtaaaactcagaagggaaggaaattgccatatatgagtgctaatcccaatgcaagtaatgaactatgcacatcatatgcatgatctcatttaattcttgtatgtaaatattagtcccatttttataataaagaaacagaagccttagagagactaagcaacacactatcaatacaaatagtaaagtggcagtgcaaagattcaaaaacccaacactctatagaagcatgttataacatttggtgattctataattctcagtatgtggatataataaatattgctagagtagactttccagccatttggaaataattattgctcatgtgatagtatatttttctcaactagaatcaaaatattaacttttgacctgggtttacctttgcatgtggataacatggatcaaatttgcaaaattctgctgagctgtgacttaaatacagttctactgggtcctcaagtttcttttaaagtcttttttttcttactaccctctcagtcttataaaaattggcaagagtatatctgagtaaatgtgacatatgaaaacatatgtttcaaatatggccttaaatatgcagaaaaaataggacttttcttcctctctcttcatgggcatgcatgtaagaaagatatatataaatatacagtcatgtgctatataacattttagtcaactatggaccatacataccatggtggccataagattataatactgtatttttactgtatctttcctatgtttagatatacttagatacacaaatatttcccattgtgttataattgcctacagtatttattacagtaacaatgtaccatctaggtttgtttaaatacactgtgatgttcacacaaggaaatttcctaatgatgcatttctcagaatggatcattatcaagtgatgcataactgtatgtgtgtgtgtgtatatatatatatatatatatatatatatgacacatgcatatgtcaatgtatatatttaatgatgtttgcaattcatttcatagaagttataaaaacattttgatttatccttgattttatagaattcacacacaaagctaataaattctaagattactgaagatgttagttaactgttttaaccaagccacacctggtgaacaaatttgctattttaaaaataaatttagattttagttaatcaaatattgttcagttaatgtcactgttttctagatagcatttttcatgtatacattttacttaatttctttcccaggaaagtattaagccattatgtaatgataaacagtgtgatttttgttgattatatgtactttcttgaattattacctcaggcctctgaggaaacactacattccagtaatgaagaggaagaccctttccgcggaatggaaccctatcttgtccggagactttcatgtcgcaatattcagcttccccctctcgccttcagacagttggaacaagctgacttgaaaagtgaatcagagaacattcaacgaccaaccagcctccccctgaagattctgccgctgattgctatcacttctgcagaatccagtgggtgagtgccctcagatgtcatttccccattttatattttagatggtgattgttgtctgtggtcttttgagtttttgtggctcattgcttgatttgagtgggagaacaatggggtttctagagtcaaaaaaaaaaggatgaatttctcaggtgacatttctatatctgcaggagaagacattttagtgaaattgttttacatggaagagctgaaaatgtattggtgaatgctaataaacatttgccaaagggcagttgtacttggaaaattaatattggccatatgtgacttgatagaagacattttaacaaatgagaactaatggacaaattaccatgtagtgatacatgtctagaaacaataggaaatgttcactgatgcaaaatgaatttggaatcaagaataaattgtattgtaattagaatcaaaagaaatatgcaatggtattcatgagtctaaaaattttgcctttgacattttgaggtattgcttaccagaatactatttcagctcccagtataaggtgattttatttagcattagtacttatagaggagtcagccacagccacgtctccatcatgtaacatttttatttcctactttgcagggtataatttttgtttttattctttttcgtgttgtttaccaatggagttttacactttaaagcaatgtcaccagtttaaaaattgtgaaagaaagtaaggatattgggcacatcaattatttgttcttgtgaccagctgcatttttaagaagcctggatagaaaggaaagaggatgaagccagtgggccatacatagatagactcttgaacatttgctaaaactacaagaacaaaacaattactatgctacaaatgtgatggtcccacattctctgccaagttaaaggcatctctggggaaaatgtcttttggatcttgttaaagttaggaaggttgtgctcagaggaaatttggctagtaactcaactcaaagatactgaatttagctgttttacttgttattgaccagtctaagggacctgtgttagaaaaaggtatgaggaaaatactactagataaataataagaaaacaaatattcaccttgaagcaatgaaaagaggaaatatattttgtttctgttgttgtaattgaactatgtgtttaaagaagaatgcacacacattgatcagactcatactaaagcagatgggaattttatatgacagcttgacctgaacattttttgaaaaatgctgttcccctgaaactatttctcctttctttggaaataacattgctgccgttcattctgtgtagaagagattcacagatatcaggtgtatccagggatcccaagatcaccctcgggttcaatgatttgctagcagagctctcataattcagcaaatagtcatattcatggctctgatgtgttatagcaaaaggattcaatgcaaaataagcaaagggaaaggtagatggaacaaaatctggaggaaaccaaacataagcttccaagagtccccaagtgaagtaagacaagatacacttaattcctccagtaatgagttgagacaacacttgtgaaatgtgttcaccagggatgcctttaccagggaagcctattaaagactcagtacctagagtttttactggaggccagtcacttaggtaccctctgcctaggatatacaaacttccagatttccagaaggaaagtggatatgcagcataaaccacattatttgcacagacagtttaggcaaattgagccagtcttaccatttagagaatggtggatcactcctgaaagtcaggtctgctaaaggccaatgtttcaaacaggtcttcctatatttaattgacacagtcctgattaactgtttactacacaccaggttatcttagaatagttatcttactttcttcacacttgtggaagaagagattataattaaaattaaaatgcactaatttaaagccctgatatattcaattagctttggtatctcaaaaattttggttgctaaccatgatttctcattttgagttggtgttatatcatgtgcccttaaaataaaatgatgcaatatacctaatatatctctatgtagttggatattgtgtgtaatctaaaatcttgagctgggcgcagtggctcatgcctgtaatcccagcactttgggaggccgaggcagggattgattgacctcatgaatttgaggcaagcctgggcaacatggcaagaccttgtctctatcaaaaacacaaataaataactgggtgtagtggcatgcgcctgtggtcccagctactcagcaggctgatgcaggaggatcgcttcagcctgcttgaaggcagaggttgcagtgagtcaagatcctgccactgcaccctggcctgggtgtcagagagagaatgtattgctaaaaacagtttccaagtgccaaggaacttcagggttccgaattgtctatgtcccagcatttctgttgattcacattcatttccatcttcattaagatttaagaatcaagtacaattgacccttgaacaatacaggtttgaactgcacaggttcctttatatgaggattcttttcaaccaaacacaaatggaaaatatagtattcctgggatgtgaaactcatgtatacagatgggctgacttttcatatatgtgggttccacagggccaattgcaagaattgagtatgcatgaattttggtacatgtggtagacccgaaaccaatcccctacatataccaaggaatgactatgtaagcaatgtcatgcttactatttacaaatttatccaatattatgaagaaaataatttttctttttgaaagatggaacaagggtttcatttcaaaagaaacaatagacaataatggccaatcaacaagaaccaaactaagtagatattaaaggtattgttattacatttggaagccagaacaatttgcgaattgaatattgaggactagaaaattcaggagtataactttctggaatgtcgaagctttggaggagaagtagaaggtaaagtgcggggccaggtgcagtggctcacgcctgtaatcccagcactttgggaggctgaggcgggcagatcacaaggtgaggagatcaagaccatcctggctaacacggtgaaacccagtctgtacgaaaaatacaaaaaaaaattagccgggcttggcagtgtgtgcctgcagtcccagctactcaggaggctgaggcaagaggatggcgtgaacccgggaggcagaggttgcagtgagccgagattacgccactgcactccagcctgggcgacagagtgagactctgtctcaaaataaaaaacaaaaaacaaaaaacaaaaaacgaaaggtgaagttcgggcttatattctgtagccattttagttaaccaggagccccagattcctttacagctgtcagaaagagctaatgggaaatttagcctattttaactgagttgtctccagcccattgcctcattattaaaggttagtatgcctttaagtcccattgccaacctatactgagaccataccttagcaattgcaaatctttgatggtcaaggcgacttttcatgccctccagatttattttcctttctttcttaacatcatagccttttgctctttcttctggcatatcagtatgccagatactttctttgtcaagtgtcaggcagtgggtctagagacttgtaccacccctttagaaagccacagtatggccctgagaatcattagtttctgaaaaagaactttgatgtgcagaaataagtgtcgtagatgacagctattagcttcctcatgaagtacttgggtcaagagactgagttcaaaaggacttttagttattcacacttccatatttctactttgactttttttcccaagcaatgcgaatgtgttcaaatgtacactttttaacaatttcttttgagtatgcccaaactgttaggttgtgtgtatgctgtgatttagcaaacttaagaaactgtaaatgaacagaaaacagaattattaagacctgggatgcctataaccctgaattcatctgccagttaactttctgtacagggtaggcgaattcaggcttcatggctgtttactgaccttcctcgaagtaagagagacagctattaatgacttgaaatgttatgaacgtggcatagaagtaatttggaaagtcagtttttcatattttcctcctaaataattttctattacctttcataaaatctttttattaaggtataatttacatgcattatacatcttgaattaatatgtatttatactgtcatgtaatcaccatcctatttctcaactgatcactaaaggttattttgcctcctcttggacttcacataaatggaattgtactgtatgtacttgttgtgtctggcttctattagtcaaaatttttttttgatatccatgtttgtgtatatctcagcagcttgtttttattgcataaatatagcataatgtatttatttttactctcttactaatgaacctttgggttgtttctagtttgaggggattatgaatgaagctgctatgtacacttataccagtctttttgtgaatatatgcactcatttcttttgggtatattcccaggagtagcatttctgagtcataaggaggcaaatatttattttcattactgcccaacagttttctaaagtgttgtactcttttaccctcccaccagcaatacgtagtaggtacagttgttctacattctcaccaacacttagtattttcagtctttttcattttggtcattctggtgaatgtgtagtggtatactactgtggttttaatttacatttccccgatgagtaggaatattgcttaccttttgatgtgtttattgaacatttggatatcttctttgtgttatgaccattcagacatttgttcagtttttattttacttattgatttctgagggctctttgtatattctagacatgagtattttgttagacatgtgtattataaagtgaatattttgttctaaacagtgtcttgaatttttactttatgtttactttgaatatgttggtaatcctagggacctgtgaaatatgagggaagtgtgcagcagggagaggaaactgtaaggcaagaagtggacccaccttaataaggggaaaacaagaatgacatttaacctgcagagcaatttcacttggagacaaggacagctggtcccttgaatattggatggtggcaaataagacatccaagcactaagagggcaggcagagaagagttgagaatgaagcaacagcatgcttatggtggctgatggccgggtagtgagtagacaagagtggggctctggacatagatggtctgaatttgagtcctgtctcccacctactaccatcttgtgaaggtacttaaccactccaagttcctaattttaaaaaagcaaaagtaggaataatgcgagcacctacttcatgggtttgttctaatggtatactacctatccccatttttcacatattgtgaatacttaatatataacatcaaaaactgcaactcctatgctgggaaaatattagaacaaataatgtttgttgttgttaatatttgtttacttattggaattggcttcagagatactctacaaataactcttggggtagagatggatgttctagcagatttgggagtcaatcagaaattggctcctgtttcagaaagttacagttattatggacttgtgacatttctgttcagaagtctgtatctggcatcttcccgcacacatgtcttgctttcaagtgctgttcagttatgtttggaatgagaatggtggtctccctacttctgcttcacttcttccacaaccttgctgacttctaaatagtttcctgcttagaatccttaggaggaattaggatctcctttcagccctatcttgggcactgacttacattcccacatgtggtccatgtgcccctagacaatctaaggagagtctagcttgccacacatgtggaaatcattcccagttcacaggtgggaagttatgggaatgaagaaaatgtgggggaggtagcaataaaactctctacttacatttcattgctgcatctgctataataaaatgagagccaagagcaacttattcccttgtgacatgatgacacacctctggatagatgtatattcagggatatgggtgggtggagaatgttacaaacactttctcatccctagtatcctattacctgtctgaagaagtacactgtgtaccttcgtatcactatgtcctataaaaaaagaaaatgaaaagaatgtaaaagaagacatggtcacttttggggataaatttaactacccaacagagagagaagaattactttattcatataagggttcattttacaaggatcttccagaaatatttccttgatttgtgtgctattcacagagggactggtcacagatgccagttagacattggattctttgactaaccactcttcatcttgtgctcttgagtacaaacagtacgttagagagaacattaaaaaaaagattgttttcagcaatttattcctgaatcaaaatccaaacagaaaataaaaaaggaaaaacagaaggctggatcagacacatctgatctttcaaatttggccttttaaacttaagaaggtattaatgggcatttcatattttaaataatttggatataagggtgtttataaagctagagattgtatttcacagtctaccatgaagcctgtaccttcatgtttgatgtatgttcaagctttaagtgatttatctaagttcttattgaatgttatatggaagatctataacccactaggcaaagcttcccaaaattgaaaataaaacacataatcatgattgtgaaacattctgtagaaatatagtattcttgagctagatgaaattttaaaagtaatcaatgccaaaaattgggaaacaatacttccaataatcttgaagatgcatactaagcagacaaaattggattcttttggttttgattgatttacatgcaatttatgattgtagtgtttatctaaacttctcaggatactcacaaaatatcacaagccttttattttaaagcattgttctgatttaatcttatctgtctttgccttaaactttgtaaatttgtgattatttttgttttgttttgttttgttttgtttttgaaacggagtcttgctgtgtcacccaggctggagtgaaatggcgtgatctcggctcactgcaacctccgccccccaggttcaagcgattctcctgcctcagcctcccaagtagctgagacgacaggcatgtcccaccacaccaggctaatttttgtatttttagtagaaatggggttttgccatgttggccaggctgttctcaaactcctggccttatgaaatcttcctgcctcagcctcccaaagtgctgggactacaggcgtgagccatcatgcctggccccaaatttgtgattttcaagattaaaattagattctaagagtgatggagcactttaaaatatctggataaaaatcatcttatttccagaatcagggcaattcttgaatctaatctaaaataagcaatgtaaaaatgctgacttttttctcacctatcatagactctctaaaaggtttatgctatatctgccatgccttcaatttacaaaataatatgatcatgattaaactccagtgtctttttcaggttatcacagtaccttttcattattgtagtacattctggtgtccccattaaggatatgctgaatggactgatactataccacagtattttactttatatctgtgtgtcagtaaagcagcatgtaccaggggaaggtttacctttagaaatcaaaggcttctatttcaccaggctcccacgttgttaaaaacactaaagagggtgacaacttctgcgttcaccaacatcagagcatctagtccctattttcaaaactttcttgtgccaatatgacttgttttagtaatagagattggttggggaatcccatattttttaaggcaaacccaaggaagcatttattttaccgtgaaaagtgctagggcacaatactatattaagcacaaggcagaactcaacaaagccctttcctttgattatttccatcactcaataataattgttccactccatagatagtttctttgcaacaaacactgccctggctgaccatccttctgtaatgcagaactgtgaatcactgaagtgtttaaggagagcttataattctttaaaagcctttttattctgttttacagtatttgtgtttatgaaaaaaatgcaggtaaaaatattctgaccaaattgtatttgtttaattattatgtattgcataatgtataatactgattcaaacttaacatgaccagagtgcattgcttggagaaatccaaaatgaaaaatatattttcagttgaaattcattaaaggatgaagtaatcaaactttttttctctacaaatgagcactacaaaatggcaaaagttttcttttaaaaaatctgtatatagaaaaaaactatagaaaaaatatatcacttcttgggttaaacacacttccccccaaccaaaaaaaaattctaggtacttagaattctttctagaacttagaatttccatattatttttcatcccatttctctcattcatttagaatctgccctccagttgaaaggaagtagatggagccgggcacttttagattatttcaaatctgaggaattcaacaaaaataaatgctatttagttatgttgtttgaagtcatgtatgcaacatatctggatgatgggtcaactttgtttaatagattagcatcatttacactgaagttcgtggctctgagcttcgttaaagtgagacctttgtccacattcccaggagggctttttctcagggggttctgaattttaccatgacgtaattcctaaacagttgtgattagtgctaaatgttatcataaacacacacacacacacacacaccccttgctgtgtgaaagctagatatagatattaaaaactttagaatacttgttttttaaatatgtaatttataatatataaataatatttagaatataaagtttataatacataaatactatacttctttaccattcactttctagaactttcccagcttttgatcacatatttcaagggtggtctccctctttactcctctactaactcttctgtgtctcagttaacatgtgattttggctttcttatttctccaacattatttaattcagactaactttatttcttgaaggtatataccagacatacctcggagatattgtgggttcagatccaggccactgcaataaagcaaatatcacaataaagcaagtcacacatactttttggctttccagtgcatataaaacttatgtttacactatattgtagtgtgtaatagcattgtctctaagaaaacaatgtacatgccttaagtaagaaatacttaattgctaaaaaaaaaaatgctaacaaccattagagccttcagcaagtcagaaacattttgctggtggagagtcttgcctcaatgttcatgactgctgactgatcaaggtggtggttgctgaagattggggtggctgtgacaatttcttagaataacactacagtgaaaattgccacatccattgattcctcctttcatgaacaatttctctgtagcatgcaatggtgtttgacagcattttacccatagtagaacttctttcaaaattggagtcaatcctcttaaacgctgctgctggtttatctactaagtttatataatattttaaatcctttgttgccatttcaacaatgttcacagcatctttaccagaagtagattctgtctcaagaaaccattttctttgcttcatccaagaaacaactcctcattctttcaagttttatcataagattgcagtaatttcattacaacttcaggttccatttctaattctagttctcttgcaatttccagcacatctgcagttactttctccacttgaacccctcagagtcatccatgagggttggaatcaatttcttccaaactcttgttaatgttgatattttgacctatgcctatggatcacaaatattcttaatggcatctagaatggtgaatcctgtccagaaagttttcgacttactttgccctgatccatcagagaaataagtgtctatcatagcgatagccctatgaaatgtatttcttaaataataaggcttaaaagttgaaatgactccttggaacatgggcttcagaatgaatgttgtggtagcaggcatgataacattaacctccttgtgcatctccagcaaagctcttgagtgactaggtgcattgtcaatgaacagtcatattttgaaaagaatctttttttctgagcagtatgtctcaacagtgggctcaaaatatttagtaaaccatgctgtaaacagatacactgtcatccagtccttatttttttatttataaagcacaggcaaagtagatttagcacaattctcaaaggccctagaattattggaatattaaatgaacattgtcttcaacttaaagttaccatctgcattagctcctaccaggagagtcagattttcctttgaagctttgaagccaggcattgacttttcctctctagctatgaaagttgtagatggtatcttctcccaatagaaggctattttgtctccactgaaaatctgttgtttagtgtagtgccttcatcattgatcttagttagactttctggataacttgtcacagtttatacatcagcacttgctgcttcacttcacactcctttttttttccagcttttattttaggttcagagggtatttatgcagctttgttaaatgggtagcttgtgcaccctgtacttttatgtattggagatggcttcttttctttaaacatcatgaaccaccctctgctggcatccaacttttcgtctgcagtccttaactctctcagacttcattgaattaaagagagttagggccttgtttgggattaggctttggcttaagggaatgttgcggctggtttgatcttctatccagaccactgaagttttctccacattatcaataaggctgtttggctttcttgtcatttctgtgttcaccagagtagtacttttaatttccttcaaaagctttttctttgtattcacaacttggctaactggtacaaaaggcctggctttcagcctgtcttggcttttgacatgtcttcctcactaagccttattatgtctagcttttgacttaatgcgagagacctgtaactcttcctttcacttgaacacttataggccattgtaaggttattaattggcctaatttcaatattattgtgtgtcagggaatagggagacctgaggaaaagagagaaattggggaatggccagtcagtgaagcagtgagaatacatgcaacattaatccattaagtttactgtcttacatgggcatggtttgtggcaccccaaaaattaaaatagtaacatccaagaccactgatcacagatcaccctagcagatataataataatgaaaaagttcataatattctgagaataccaaaatatgacatagaaacacaaagtgagtacatgttattggaaaaaatggtgccaatagacttgcttgatgcagcattgccacaatattcaattggtaaaagcacaatattgtgaagtgtgataaagcaatgtgttagtctgttttgcatggctataaaggaatacgtgtgactggctaatttacaaagaaaagagatttatttggctcattgtttagcagggtgtctgggcaaggcaccagcatctgcttggcttttgtgaggcttcaggaagcttttattcatggcagaaggtgaagggggagcagctttgtcagatgacaagagagggaataagagagggggcaggtgccatattctttaaacaattagatctcacaataactcatgaccacagggagggcaccaagccatttatgagggctctgaccccatgacccaagcatctcccactaggcccaccatcaacattgggaatcaaatctcaacatgagatttggagggtataaatacccaaaccatatcaagcaaagcacaataaaacaagtatgcctgtatttatacacatattacaaaacagaattaaaaacaataaaatcatacatgcaagggattctggtaaatatactgatcccctcaatcatgcattagtcatatattaatgtattcactttatattcaaccaacaaatagtgagagtctgatatttgctgtatactgaggtatgcactggcgacccaaggctcaacaagacaaaacacagccttttctttcacaggggattgaatcaagtagggcacgtgcaagaaaatagaccactataatcttgtttgtttcatataatgtacaaatatgactgcagacaaatggagaaatatgaaatctcactggggagcaaactcactttggcttgtgaggaactaacacctaacctgagaccaaaataagatggttccaggaagagagaacagcaggtcaaagtccagggatgagattaaagtagagtgtctgcacttagctaaataaaaactgctaaaacatggctagaccagaatgccaattgaaggtacagttgataaaacttaccattaacttttcatgtaaccaatatgtgaggttttgtaatattttccagtatgctaagcagctatgatataaacactgaaaaggcaaacagttggattattccaaaattggaaagcaggtgcaatataagaaaaatagggcaagggatttgaaggtatttgaaagaaagtgatagaaatgatgaattgtggcaacttagctggttatggaaatgagtgaatataagaagatactgatatagaaagtattcaaggtctctagaaatctctatgatgtcaaacaggtgaattagaataactgagcaaacaaaagatagatcatatttggaggacagaatgaactttaagatgtaagtgctagaggtaatttaaggtatgttcaagacatagaagggtgtcagggaagagggtgactgccttggaaaagatgtagctgaggaactgagagatcggggcatgaggtgatgcctccacatcaacatcaaagtcacccaggactgcagcaggattcaagctgtcaagatgacaaaaaggtgggcagttttcagtgaatgagaaactgaccaaagggactggcagaagtcagagacaaggaagtagagttgattggcatagatgtcaaacgagaagtttttacaagaaggtggaggagtaagtaaaagtgagtaaccaggagagcacccatttcatcttgggacccagagagggcattgagaaccagagtaccttaccctgaatccaccacagggaagtgacatctttagcgaagagtcaaatttgagagaggttaggatctgggatgactttttggtggcaaggctgaggatgaagtgaagtctgtttgccatgggaaaagggatccagagaaactgattgaataatatggaaagaatgagaatgggaggatagacaggggagagaaatcacagtgcaacatggggataagaagttgaaagaacacagggagaggaagaagctctgtatcaggtggttgtctgagatatgattatgaaacagcattccaaaatattttcaataattggtccacctgtcctctgactgatgggtgttaaaccagggaacaagaagttgagcatagctagtaggtcttttggaaagaccataacgtttgtcctagtcccagtaagtaggtctgcaatggtgtccttgggttcctagtacatttcagcatctattggagaataggagcttctggtgtttcagtacttctgcatcttccagattactcagctgtttcccagatttattacagtctctggagtatggagaaggatctgattttttaaaaaatatgaattatcattttcaaagtattagtttattttaaataatttttatatctaactctaatattttgccagcaataataacatcttaggtattttgaattagcatttgagtttgcttttgagaattttagttcttagaaataataattgaattaaacactattgctttcttatatattcttaaatactatttctggcattcaagcattattccagttcgtcatgctgccaattttagcaataaaataaagaataaaattgaattcaatgtggaaaaattctatttgtagaaaacattcgtctgtaaacggggttactgttgtgaccttagtgaaacaacagaaaggcacgtgcatacggttttgcccttagcttggatgtaacatattatttgcagactttaagtcatagcaacctatgatcatgctaatttttatttaaggctatttgatagagttgtatgattgagacctggaaccaagatccttgatgtaatacatatgtgcacacaatttttttattctcttctctttggtgaccttgtctgggtcatttttttgtttgtttgtttaatttacactgtttgaaacagtatctgtgactagaatttggcaactgtagagtatatcatatgtacacagtgccttagcaaagggttttaattaaactcagtggaggagacccaagcagaggagccttcatttgtcttaagaagaaatgtcaaggttaattgattttcagaggattatctgcaacaaataaagaccaagactcatatcttcttattttggcttataaattctggtatgttctgttcaatatccactgaaaaaaactgagatgagagtgtttctataaaactctatatgtcaaagcatcctttgcagttggcaaaactgaatgaatgacagtgaaaatgtatacttatggattatgatatagtcattaaaatgattattatgataagtatatggtaacatggaagtatttagaatgttttgaggagaaaagcaaaatatacaagtatatccaggttaaagttaaaacactgcaaaatatatgcctgcatgtggctgagaactggaaaacaatgtgaaaataatttgaattttttgatttacaaaattgtggttttttatttttctcacattgatttctattaatgaaaataagtgtttatccaatcaataaaattacattaaaatttattatttatttacaatttcattcatacaaattcatctattgtgtcttagtatatgacagacacagtttgaggtactgggaatattttatatgtagattttaaaaattcatgaacttttgtttttcacaggcaatccaataggaagttttggcaactatggtgggaggtagggatacttgggcctttcagaattctccagatcactttgtataaccattcctctgttggtgaccgactccccaaaaaagatcaccagcagaaccaagtgaaactaagtattcatctcagtgaaataagggaggacatcacctttaaaattagtagtattttggaaaggggaagtaaagggaagatatttgtagagttttatagccaggtctgggagcctgatcttgcaaggtggaaaaatggctggcattaggcagaatttagagcctagcagttctggattagtggggtctctaagagcagtgaggttctcaaagtgaaccttgataagtgaactgttagtcttattgaataagctggttcaggccatttacagccttattttccaaaagcaaacatttcctggagcaagtacctaagttatttttgcttggtctccatgtgctcagcattaaaacaggcatttaaactttgactccaaattgtttagcactgggacagaaaagtattttggtttcagtttttaccttctttgtgagcgacctaggtttgatcaactcatttggctgacaagccggatcctttgtcccttattttatttttttagacttatattattgtcacctatattgcttggaaatttaggaaacacagtccttgggatagctggggggatgagaagtcaagagaggtaaggtcttagggtagacaactgggtagatactgggctactcagtatccaatcctcttctgttttgggggagtttcagaataggtgagagaaaggacctagccttccactaggggagtaggaatatgcattccctctgcatgcccctctggcagacagagggagggtctataacctcaatgtagtcaatctgatgttcctagccaggactttgaatcttgaggggatggctcagaccatcacatatgccactatcgagtggaagggccagtggcatctgttgtagctgctgacagtgtggcgaagagcagtgtgtgcccagcaggtgaggaatagggtcccaggcagactgatccagcctcccagctgcttattatcttcactggattctgctcaagtctgcttcttcaagctccctgtttattctgagttctatcctatattcttttgatggattccttttcctgcttatgtcaatccatcatttctattgtttgcaaatcacagcccttgatcactctagaaactaaagtacagaaagtgccctgactttgctagaagtttaggtgtaaaattagtagtaaagttagtaaggaaaaaccaaaggggaagattgaattttattttaatgcattatttttttacataaaaagataacaaaaggagggtagtgaagagaagagtctcttgagatgtccgtggcaaagtttttaaagctctcaataaggagacaaggactgggcttcattgcaattattcccttttgactgttgaagctggtaggcttacaatggactcctaatgagagtggtttgcactacaattaattaagtgcatgacattataaactgcatgtctcttccctctggagaatattcttcctatataagtgctattttgttttaatttctctctctgtctcttcctctctgtttccctctctttgtctctctctcttttttatttatttatttattttttattattatactttaagttttagggtacatgtgtacattgtgcaggttagttacgtatgtatacatgtgccatgctggtgcgctgcacccactaactcgtcatctagcattaggtatatctcccaaagctatccctcccccctccccccaccccacaacagtccccagagtgtgatgttccccttcctgtgtccatgtgatctcattgttcaattcccacctataagtgagaatatgcggtgtttggttttttgttcttgcgatagtttactgagaatgatgatttccaatttcatccatgtccctacaaaggacatgacctcatcattttttatggccacatagtattccatggtgtatatgtgccacattttcttaatccagtctatcattgttggacatttgggttggttccaagtctttgctattgtgaatagtgccacaataaacatacgtgtgcatgtgtctttatagcagcatgatttatagtcctttgggtatatacccagtaatgggatggctgggtcaaatggtatttctagttctagatccctgaggaatcgccacactgacttccacaatggttgaactagtttacagtcccaccaacagtgtaaaagtgttcctatttctccacatcctctccagcacctgttgcttcctgactttttaatgatcaccattctaactggtgtgagatggtatctcattgtggttttgatttgcatttctctgatggccagtgatggtgagcattttttcatgtgttttttggctgcacaaatgtcttcttttgagaagtgtctgttcatgtccttcaccactttttgatggggttgtttgtttttttcttgtaaatttgtttaagttcattgtagattctggatattagccctttgtcagatgagtaggttgcgaaaattttctcccattttgtaggttgcctgttcactctgatgatagtttcttttgctgtacagaagctctttagtttaattagatcccatttgtcaattttggcttttgttgccattgcttttggtgttttagacatgaagtccttgcccatgcctgtgtcctgaatggtattgcctaggttttcttctagggtttttatggttttaggtctaacgtttaagtctttaatcaaaagttgtccctgaaggaaaattaactctgctgttagtccactgagaaagcttctcttttaatactggaacatatctttgtctaactctccctcacacctagtgctaaatttatcagcgttgttcctgatacaaacattttgaagacaatcgtgaggaaaaagatgaaaaaagttgcatttaacttttgttacaggtgtccttgttctccagaagttactgtctttgttgtagtgtgcatgcagtcacaggagtgtgcatacatgtgtgaagtacttgagaagtgtatttgtccgttctcacactgctataaagaactgccctagacggggtaatttacaaaagaaagaggtttaattgactcacagttcagcatggctggggaggcctcaggaaacttacaatcatggcagaaggggaagcaaacccttcttcacgtggtggcagcaaggagaactgcagagcaaagtggggaaaagcctctataaaaccatcagctctcatgagaactcactatcacgagaacagtatggaggtaactgtccccatggttcaattaccttctaccaggtctctcctgtgacacatggggattatgagaactacaattcaaaagatgagatatgggtggggacacagccaaaccatgtcaagaagtatttcagagacaagtcattccccaaaccttatcatcagggtcaagacctggcaggtgagacattagcaggtgaacacaacattctcagaaacccttgagagtactcctttccctccaggcatcttctttcaaccttaatatattctattcaattatattcacagctttttacctcaattataattccattcttccaaatttgttttcttctcccatctttcctcctaataaaatatctattcttcagatagtcttcctttgtaaaatagaaaggatctacaaaagccattctttgtgagatgtgaatcatttcaaataaattaatgccttgttctaatgtgaatggtggacttgtgaagagaagtgggtagatatttgaatttctgaatgctttagaatattagttgcacatgcagtaatatttcctgtagcttagaagaaattggttggcttaacagaaaatgcaattaaaatagtttacaaataggttctggcatcaataatagaaatattaaagaaactacatattatatcaagatgcttctctttttttcggggggggggtgccttttcttccttgatgaacacagtactctttcttctttgtcttttatcttccatctcaaattgtcaataataaatttgaagaatggagaataatacattatcacgtgccagaccttatgctaaacactggatatgttatattgtgtttcatactcaggatgatgctacggtaggtaccattattatcttattttacttataagaaaacagaagcctggagaagttaaacaatttcctcagtatcagaaagaaccaagatcaaatatctaggttaaggtattttatcttaacctagatatgccagaatatcaaatctaggtttcactattattttgtattctatccaaatttctaaaactgctaatgatggagggctgttatatggttctagctttatatatttttttatttcaacttttattttagatatatgggtatttgtacagatttgttacatgggattattgcatgatgcttaggtatggtatatcccattaccctgatagtgagcatagtacaagataggtaattttttaatgcatcccaccctccctctaccctctagtagtccatggtgtctattgttcccatatttatacatatgtccacgtgtgctgaatgcttagctctcacttataagtgagaatgtgcaatatttggttttccattcctgtgttaatttgcttaagaatatggcacccagtgggccgggcgcagtggctcacacctgtaatcccagcactttgggaggtcgagacaggtggatcacctgaggtcaggagttctaaaccagcctgaccaacatggagaaaccccgtctctactaaaactacaaaattagccaggcgtggtggcgcatgcctgtaatcccagctactcgggaggctaaagtaggagaattgcttgaacccaggaggtggaggttgtggtgagctgagatcgggtcattgcactccagcctgggcaataagagtgaaactcactctcaaaaaaaaaaaaaaaaaaaaaaaaargcatatggctcccagctccattcatgttgctgcaaaagacatgattttattctgttttggggttgcatagtattctatagtatatatgtaccacattttctttatgcaatctactattgatgggcacctgggttgattccacatctttgctattgtgaatagtgcagtgatgagcatatgagtgcatgtgtctttttagtagaattatttatttttgtggaagtatatacctggtaatgggattgctgggtcaaatggtaattctgttttaagttctttgagaaatctccagactgctttccaaaataactggactaatttacattcccaccaatggtgtataagcattcccttttcagcctcgccagtatctgtcattttttgacttttttataatagccatcctgactggtgtgagatggtatcttattgtggttttgatttgcatttctctgatgattagtgacgtaagcatttttcatatatttcttggccacttgtatgtcttctgttcatgaagccctttgcccactttttaatggggttatgtgttttttgcttattgatttgtttaagttccctgtagatagtgaaaattaggccattgtcatatgcatagtttgcaaatatattcttccattttgcaggtcttctgtttactctgttagtttctttgctgtgcagaagctatctagttggccatcttggcatctaatctttaattttctttctaaaatatttgaatgttttgcaatttctgactgaagttacttccctctttctgaagaaggccctgctgacatcaataattatctgagagtgacataagctgactccgattatgccaaagtaacccttacgtggtatgaaaagaaaatgaaggtgactatgattcctggggcatttgagattctgagaaaactccaggtcagctcgccataaaaattccccacacctgtagtttaatttaccaattaggaaattatatatttggggctaaatggtttctgatttgttggcctgaaagaaataatgtacttttaacaactataaaagttctctgctaggaatatcttaaatacagtgaaaatctgccttgacagtggacagtaagttagatttcattgttgtaaattggcaccattaactaaaacccttgtccattcaaaataatatgtattgtcacataacactaagctctgttattaaactgccacagattattgctttaacagtttgaaaatgatttttagaaaattgactttgtacaatgctatattagagtctgttaattgatgagaaaaccaaactcagatgacatttgcaaaaataaaattggcatcagttgaaacatctgtaccatttctcttatttaaaagacatttttcatctggaaaatgactacttcgattagcctcagatcacaaccacaaaataaagttgtctatgggtggcttcttatttgcatttaaattattatgttgcagcattttgtatgcacaagcaaatggaagattgttttgaatgacataggcctatacacctgagagagaaatatgtcatctacaaaatgtaaaaatataggtttttgtaaatgcctctgaaaggattataagaatctacattttcccctccctcctggagtttgtctttctattaaggctctagacgaagaaaagctctaatatactttccttggaggggtcatgagacaatgaagcataataggatttgaagtatattggatataaaattcatgtgatatcctcaagtagagagatgttattttactgttctttaatctttactgttggcgataattgcctttgtaaactaactttatgttgtaaactagtagcgaaccagagattgagttgagaggtgggggtaacagatgagatcctcacttgtgagggctccaagggcctgtgaggcaatggaaagggctgaccttgctacctggatgggaacaatgctgttatcattttcatgtgctcctgtttagaagatgagttaacatccataaaaacaagttagactaagggttgtcacactacagcctgtgggccaaatgctgcctgccacttgttttataaatgaaggtttcttggagcttgcactactactgcagagtagagtagtggagatggagaccattcggcctgcagagtcaacaatgtttaatatctggtgctttacagaaaaactttgccaagccttgatttagacttagtaactttagtaagaagttactgactgcacaaattaccaggatatttaagcttgtaaagtattaaaataccataactatctgcttcttgtggcagggagggggccaaggagaggtgaagtggttataatgctcgtgcattggttccttcattcaccagagtgattgtgcgccctctctgaaacagggataatgccaggtactcaagatacagcagtgagcaaaaagaggcatagtgccttccttaatggagatatgcattggagtcacatagcataataatgttgacaaatatccctgctctcatggatcaagaggttagagttttagggtaaccatggaagatctcactgagaatgtaactttgaataaaggattagaggacttgaggaagccaaccatgctgctagagtttctctgcagaggaaaggggagtgatgagatataggtgaaggacaatgtgagccaagattgttttttttaagttgaggaattaacagcatggttgtatgctgagggggacaattcagtggagagggaaaaattgatgttgcaggaaattgctgggataatgtctttgagcagataaaaagggattgatccagtgtacaacagaagggactagtcttggttttggatcaaggacagtttatccatagtaaaataagagaacgtagagtatatgggcacagatgcaggtcattgggtagtcgtggtggttgaaaattgtagaagttctttttttaaaactttaatttttcttagtatgtgcaaaggccttgaagcaaaatagagcatggtataatcaaagaattgagagaagaaaaacataatctaactgtaaattaagcaataccatggagccagatgaggctgacgaggtacacaggatacagacgtcagcaagactaagaatatggtaatgctaaaccaattaagaatggggttaaatcaaatttgcctttttaaaaaaagatgactgtggctactgatagagattggataggagagtgcaacaagagtttctgtggagagaccaatcaggaagctactgcagtaattcaggtgggaaatgaaggcwtcatggtctagagtagagggagtggggagaagagaaatgatcagattttgagagatatttagaggcagagtagatagacttacctcacttatgtttgggtatagaagacattgcctatgtaaagactgagtagagaagagagcctaggagtagatgtggacactcaggagaaggattgagatcctggtttagaacactgagtgaagaagctgggtattgttaaagaagagagccaaacttcacaactgcctagcagtgaagaagcagatcaacaaaaatcatatggtgcggaagggatacttgccattagattagtccagctgaagccaaacgctggttgcttctgatttttttaaatcctataaatatattggttaattttatttaaaaaaattgaacttttcattctcataatgagaccaaagtaaaggtcaaaatcttaagaagagaatgggtcagaacatagcaggcagattgttgtttgacatgatgtcaatggacacttcagttgtcatgttctaggcccattacattggcctttcctcttttgaagcttctctcatggaaccaagtgcattttatatctgcatctgttccaaatatgggtataacacagactctgtgagtagcctgcaatgtgtttcccttccacatattgctagataactctgcttataaaaatctgcttgcaaaaatcatagaacttgcagatcctgtcaaaagaattactattagatgaagttaagaaatgactgtagaagtaaaagaacaagagctggtcttaggagttccatcccttcatcagtctaggagggttgggatcttagaggcatttttgagctgaaaactcaaggcaggaaacaagccatcccactctgaatagggctgtgtttctcacctgaacagtgagaagagggtgttatattttctaataaaatcccacattaagttagacaaaaactctgtataactatggaatagactttactaatggaaagagtaatgtgaaaagctaaataggaaaattttaggcacgtattttcacaatagatcttgctgtacttgggggaggcttgtcttcttgattactaaggttaacttagtgcttcagaagccagcccgtttttatgttctgctgttttcctgattttggtgtgtcttgatgccactgtgttctagtaaaaattcccttcaatagactgccaggagagcagaccagggagtgtgagtgttttgtgcatgggcgagcacatacagatgttaggtgacagtggttattcagtcatgctttcagacctggagaacagttcaggtcaaaatctccaagtctgtggaatgaagctttgggggaattaatcaaaatgttactgaaagaaaagggaaatcaaatctgacttccacccctctgagatttttgttgaggacacagaatgagagcataaccttcaggtccagagtggaatatagagagatcttccactgacaatatgctatcaacaaaagcaaggtagagaggaaacgttgagcctcagcaacctgtaagtcaagaccctctccatcatccctagatgcttttgctctgtcattgggattgtgtccctttctataacactgtgacttctttggatctccacagcctgactgtgttcacgttctcctctccagtcttttagtttctcttacagagctggtgcatttctgtggggacagagcagctggaacctgggcccgaagctggttcagatatggaattccctttaagagcaaaaataacaattactaatataatacaagcccaatacaaagtgaatagttaaaaggagaaaagatatcactatgaattcaaattttaagttaacatatatcccaactaccacaaaatattataaatcataacattttattaactgcccaacccaattttataatacattttcccctatgcttggctaaatattctttgattgtctctttaaatgacactgaaattgtaatattttctatgtagagattgggaagatactttaaacttttcttcaggattgttgatttttaaaaaattattaatagttagaaaagttttgtaatgtcatatacattcttaacattgttatcaaattttgagaaatatttaaatttttttttcatgtaggagcgtaagatttcagggcattcgatgtggtgtgtgtgtttgtgggtgtgtatgttgactaatcttacatacttgtattcttttaccagtttgtcatcgaagtgtcactgcatttgtcatgagatttagatcctctctgtcaatgtcaacattttatatcaaatcagaaaaaaattaaaaattgtttcaatgtgtgttagtttgattaactccttttcattaatttacttgtcaagcaacccaagggccaattcatcatatctatttgaaatttatctctttctcttattgaattaccacttttgagatgatctggaaaaaaattgttacaatgtactgtctgatatctgaataatttctattgatttaaccacttggctttactgcattttcttcatactccaataattgtatttgaaattttcttattcatttatatttttagtcctttaatctaaaaaaattaaggataaaaaagcatccttcacgtatattgaaatcaggagtcagtaatttttcacttgtttaaacattcaaaacatctttctaactcacttcttgatattgggataattttaattttacttttgcaaattttgccaaagcatctggctaaataaacacacttgccagggcaccgccccagagcctcggcaggtacttatgcaagcagagagccctgcagctttggcttttatcatcttcaccataaacccatctctgattctcccctttccctacagcactttccactaacaatacacatacacacccatatcacacctatactatttatttttctttatgccccttttctgtagtatttatatccatagcaattatcaccatctaacacactacatattttgcttatttatttatttattgtttatctctccacactagaatttaagctttgtaaaggcagatgtgttcctttcctgaggctgccatataaatgaccacaaatgggtggctcgaaacagcagaaatttattctctctgagttgcagagagaattctgcatctcagaatacagttcaaaatcaaggtgctgtagggctggttccctctggaggctctgggggatgattgcttgcatgcctttcatagccgccagtggctgcttccaacccttggcactccttggcatggggcttcatgaggttcaatctctgcctgtgtcctctcgtggccttttttttttttttaatctgggtctctgtgtcttctctttttctgatcttaaacataatttcttgaggaaatcataaatcattggacttgtagctcaccctaatacatggtgatcttatctcaaaatctttaccttaattacatctgcaaagatcctttttacaagtaagtttacattcttattccgggtgaacttatcttttgtggaccacagttcaactcactacagaagttacaatttttctgttatgctcactgatgtgtctccagcacatagaccagagcctggaatgtagtaagtgctaaataaatatttgttgaaggaatgcattgagagcctatagtgccagatgctgaggtaggtacttagagcactgcaatttaaatattccctaactataatttatcttctcttttcaattcacatataaatatttttttaattttttaaattttttattttagattcaggtggtacatgtgcaggtttgttacatggatatattgcatgatgctgaggttcgagtttctattgatcttgtcactaagataatgaacatagtacccaattggaagtttttcagcccttgcctcctctctccctcccctctttttgagttccttgtgtcactgttcccatcgttatgtatgtgtgtatgcaaattttagcttccacttataagtgaaaacatgcaacatttggtttgctgtttctgcattcattcattcattcattcaatggcttatggctgcatccatgttgcttcaaaggatgtgattttgttttttcttgtggctgtgtagtattccacagtgtatatgtaccatattttctttatccaatccaccgttgatgggcacctaggttgcttccatgtctttgctattgtaaatagtgctgtgataaacatacatacaagtgcaggcatctctttggtaggatggtttattttcctttggtattatacccagtaatgggattgctgggtcaaaatggtaggtctaattttagttcttttggaaatctccaaactgttttccacagggtctgaactaattttcatttctgcaaacagtgtacaaccattcccttttctctaccgtctcgccaacatccgttatttttttacttttcaatatagtagccattctgactggtgtgagatggtatctccttgtggttttgatttgcatttctctgatgattagtgatattgagtatattttcatgtttattggttgcttgtatgtcttcttttgaaaagtgtctgttcatgaccttttcccacattttaatggggttatttggtttttttcttattgatttgtataagtttcttatggattctggatattaggcttttgttgaatgcatagtttgcaaatattttctcccattctgtaggttgtctgtttacttggttgatagtttcttttgctgttcagaagctcttcagtttaattagatcctaattttcaatttttgtttttgtatgcaattgcttttggggacttagtcataaaatctttgcctaggccagtgtccagaagagtattttctaggttttattctaggatttttatagtttgaggtctcccatttaagtctttaatccatcctgagttaagaggtaggggtccagtttcattcttctgcatgtggttagccagttttctcagcactgtttattgaataaggagtcccttcccccctgcttatttttgttgacattgtcaaagatcagatggctgtaggcgtgcagctttattttggggttctctattctgtttcattggtctatgtgtctatttttgtaccagtatcattctgttttggttactgtagttttgcagtataatttgaagtcaggtgatgcctctggctttgttctttttctttaggattgctttggctattctgctctatttttggctccattttacattttagaataggtttttctaattctgtgaaaaataacattgataacttcatagaaatactgttgaatctgtacattgctttgggcagtatggacattttagtgatattagtcattcaaagctatgagcatgaaatgtttttccatttgtttatgttgtctatcatgtgtcatttatttcagtagtgttttgtagttctccttgtagagatctttcaccttcttgatagtcctaggtatttgtgtgtgtgtgtgtgtgcacctgcgtgtgtgtgtgtctattgttaagtgagattgtgttcttgatgtaggtctcagtttgaatgtcactggtatatagaaatgctactgattttcgtacattcattttgtatcctgaaactttactgaagtcattatcaggtctaggagccttttggtggagacattaggtttgtctaggtaaaggatcacatcgtcagcaaagagaaataattttacttcctcttttcctatttgggtgccttcatttctttcttttgcctgatcgctctgactaggacttccgttactatgttgaataggaatggtaggaatgggcatccttgtcttgttcccattcttaaggggaatgtttccagcgtttgcctgttcagcatgatgttggcttggggtttttcatagatgactcttattattttgggatatattcctttgatgcctagtttgctgagggtttttatcatgaagggatgttggattttgtccaatgctttttctgtatctattaagatgataatatggtttttgtttataattctgcttatcaattcactataagttctttgaagatgaaaactctgtcttttatggtgtttgtacattttgaatttcttaatactgtgtatgtagctgacaacacataaatagatatgcaaatgagtaagagagtcatttgggatcactgctgatttaacttatcttgccatgaaagcattctgttcctctttcccatgcttggtaatatatccttttggaagaaacactcttgccaaaagagaatggcattattacatccaagggaaatattatttgcccaagagtgtaaaaatgtatgaaagaaatatgtaaataaaatcctatatgtaaaatctaataatatcaaagtttaatgatgaaatttgtcaagatgattataaaatatcacagttaaactgtatattatattcatgtttcttgccatttgtatgctaaaaacttataatgatttgaatgtacaaaatcaaaaatcgggagaaaagaagatagatcagagcctattaccaataatttatcctttacctccataaatgtttgctagaaatgccaaaggctctaatttgtctatttaaatgtacttcaaaaaagcattccccaagttgcctatttactctgttatctctataaatcaggaaactctccaggctttccactgtgaatgttgtatggaattgatagaacaatttcttttttatgttgtactcattcaccatttagttacttagacaataaacttagaatgacaaattctaagtctcaaaatatgaatgaaaattcactcattttcagaacaaaatttagcatcacactctcttgagcaaaatctcactagaaaaaaagatagagaaaatacgttatagcatttgaagtctgctacctcatgtccttttatctgctttctaatttattagaaataaatatgcaattaaaatatgactttccttaacctttacataattataattattatgaaaaatatgtgtaaaaatatacatgttatattccttttctctatactaccaacagccactcccattcatgtactcatattagaagggaagagctttgaatatcatatataacattttcagataaaagaacttaggtccagaaaagctaactcttttgctggtgactaaacatacacatacgtgcactgacacacacatattaagttactgagttgatagcaaaaaaaaaaagtgcaactttatatggaagtagaattatgtaaaaatgtctgtctaattctatactggaaaatatctcatatgaaatggctccttcatatgacaacactcagtattcaaaagcaaagcacaacaactaagaaagttactttccccaaccaaaaaaaataataataattaaaaaaagaaatgtacctattgtggactagctgattggataccatggccacagccctgattttcagtaaagacatagtttcaagaatgtcattcagatggtttcttaagtagggatgttgttatttttagcaaaagaagccttttgtccttgtcacatcaaaacacaaagaattccataagtcagtgccagtcttgtttttaatgcctaaatatctggccacatatatatttatgttatgtaaatgttattgccttgtttttcagaataagaatttagaacattagaaattgacttttataatgcaatttttttcaaactctttttggcttttctctaaatctcaaaatttgtttcaatttaggcaatggaattggactagtcagtctaatttatttttgttagccagtttcacctctcagattccagggaacaaagccaaactataagatatctactgaaaacatttgtaagaaataattaaaagcagactctgaataagcatataaaatgaagcatttttatcacaagctttataaattttttaaaaactgtgttcatttaattctgaaagcatgcctcttttgtaattatgaaatacagaaatatttgaaattccccagtcatcttggctcacaaatagaaacatttggttgcgtttggttcacaagcacacaggggcctgctgcttttggttctgtgtaaagcccatactatttcttgctttttttttccacaatgagtatgtgggtgctagaatgttatcgaaatattttgcaagacatgaatctaaaatgagcactctgctatggttgcagttacagtgcaaaccccatcaagttgctagcattggactgatagacaaggtaggggcagccagagagtctgagttcctgtgaggaactgcaagggggaaggggctgtgttcaggggctgtcctgcaggctgaaggttgttattagttgtgtggtttctgggcccacacaaaactccaccttctcccattagaagtcagtgtcctgttgatgtgaccacctgctttattattcggggttttctgccatctaagacctgggccactcacctggatttttgaactcttgcttttgcactgatacctgattcagaatccgatcaattgcctttccatctttgtctgtggggaccagaagtacagaggtcttataggtgagcttttattctttcttccagaaagagtatcctataactgtgtcagtgaggaagtgaaacacaacctcctgtttgaaacacaaaaggaatttagagaggagtaaaatacagggccgtttaattattccctttaataagaagcagcatccccaccaaagaacatgtcgatcttacttggtgatacatttccctatggagaagggagatctgattgaaagaagaccgaagggcaggagggagggagggttgtaaagcaaggatgtggctctgtgtaaccgggataaaagcaccctgccttagggagatgttgtgagaaataccccagcaccctcctgctacaagaggcaatccttatagctggctcttgccatggttaaaatgattgggacaaaaatattaaaaaagaaaatgctcctcgctatactggttggaatcctcaggcttggagtaggaggagctgagtaatccctgcagtgtcccgaaagctggaatcctgagtagattcaggccaatttgtgtgatattcccagggattccctccctattttgggcagaggaatggatttggatggggcagcatgttcctgtgagttggcaggcacccactgaacagaataactgatttggtacccagactgcagataccagctgaattgccaagcagatattgcctgagggaaatacctgctaaagttgaaatgatcactacttggatgggttaaacatttaccagtatcaactagtattatacatagtgttttagtttttctgaaaatgtgcatgcacatgagaagaataagtattaagatgaaactcccagtccctctccagaggcacaaccatggttaccaatttcttatataaagtatatatataaaagcttatataacctcttcttttacttattaaatacttgcattgattactttagaatgggcaagtaaaaactagtttaattgtaataattgtaatcactctaatacattttcttattcctgaatatttgctttgttttaaactttagcaattatgaaccttatactagtctaggaaaattaatctgtaaatatttctgttggaatctcagatttataattaaaaaattatatagggtatgttacataatttctgatcaaagatttagattaaacaaatatgtttgtgcacttattacatcgtcagcactgtcctgtgcctcactcaatacgtgaacttatttaatgtaagtccacttaatttcactgtagaaaccaaggagaaaaaggtctggggcacatacatggcattcttgtgaatctttctgaaagtgctctcttacctgacatggtagggatatcctgaaaggtaagaagggaaaccttcagggcagtgccatttgcagctaggtctttgagaataagaatgaattcttattcaatatgctggtgccacagttagggctaaagtatctttagacctgccatctctaataataacggccatttctgacttgttaatcttcccggcttttttccctacaattttaggtctaaatcttccatgtaaacacactctttcatgctgaatcctgctcaaataactgccaagatgtttgtttagtaatcctgaaatagaagattggcttctatgctaagataattattgggagaatctcttcttttaataaatacctggttcttctcaaacccatgccaagaagaattcttataatatcatttcttctcaaacccatgccaagaataattgtcaccatatcatttcttgctattcatcccttttaaaactaagaaacaggccaggtgtggtggctcatgcctgtaatcccagcattttgggagaccgaggccggtggatcacctgaggtcaggagttcaagaccagcctggccaacatggtgaaacccgtctctcctaaaatacaaaaattagccgggcatggtggcgcatgcctgtagtcccagctacttgggaggctgaggcaggagagttgtttgaacctgggaggcagaggttgcagtgagctgagatcgtgccatcgcactccagcctgggcaacaagagcaaaactctgtctcaaaaacaaaacaaaacaaaaaaactaggaaacattaaagcttccaaggaattgagcgttaagtggggtctaacatttaatatgactgtagagtaactcctctttactaagtctttttactagtttctccctttctctcaaatatgtacagtttaaattggatgggtaaagcaaatgggagagtattgctactttttagtcatatttatacaaatgaattatataatattaattgttcataatattccttgtaatttatagcactgtgagcagtataaataatttgataagcgctgggcctgcccagcctttgtaatgtcttgtcaagagtagattgagaactgtgacatgatgttaggaaatggagatttacaagcttactgaagaatataactgaggcattaggagtgcttttctgatcggattaatgttcagttttattttcaattttatcaagtgagtgttaatgagaaatttagttggctccagtaaaatcattatttttttcctatgaaacatatgaaacctaaaataatagtctaattgtttcatttttatggcttcgaaattctagacaaaaaaaaaattctagacaatgtaaatatttaaccagtaaatattttgatgcattaaatcgcaaaatatcttttataattgctgcatctctcttccaaataactagaacccaattcccattttcacttttctcacataaacatgaaaccatttcttatagtctgtaaacatttctacataagtggctagaacatatactgccttatgtttaattgcatgagacccgaacttatttagtgagtattttgaaaagcagttaaagaaaaaagatgatgaaacattaatggctcccttcctccaagtagaagataagagtaatatacggtcatggagttcctttttaaggggatgtattagttttctatttctgcatataaagtcaccccaaagctttgtggcttaaaacaataatattttattctctcatggtttctgtgagtcaagaaattgaacaaggtagggtagagatagctggtctcttgttatgtaatgtctaaggccttagctggaagactctaaaggttgagggctgaaatcatctgaaaagttgttcatgtctggtggttgatgctggctgtgggctagagacttcagttcatctccatgagttctctccttgagggttagtttgaacttcctcatagcataatagctgatatccaagggcaagcatccccagagagagtaagaacctgttagaatctgtgtcctttttatgctttggcttggaaaccacagagcatcacttcaaccacacttcatgggttggatcaacaacaagtatccttcaatattcaaaggaaaagaacgtaaatccaactcatagattctaccagtcacaacgtaaagtaacataagaagatctgtatattaatctttggaaaatataatatgctatgggaggagtggacacaggtttagctaatgccaggttagggttttattaagtgggacatgaaagcttagagcttgaagtgacgagaaagagggagcagggttggatggggtgagaattttacggactgtggatataaaggggctgcattagtcagttttcacactgctataaagacatacctgagactgggtaatttataaagaaaagagggttaattgacacagttccacagaccttgggaggcctcaggaaacttacaatcatggaggaaggggaagaggcatgtcttacatggtggcaggtgagaggaaaaagagtgaagagtgaagggggaagagccccttagaaaactatcagatctctttagaattcactcactatcacaagagccggatgggggaaactgcccccatgatccagttacttctacctggtctttcccttgacatgaaggggttatggggattataatttaagatgagatttgggtaggggcacaaagcctaatcatatcagggacagagaaaggagaagtgaggaggctgacattatgagatggattttgagggaataacagagatgtttaacggggatatttatgcagctttgctgtgtggaatgtgaggtaaaattgtttctctatatttttataatctttagaggaaacatcccactgggttgtagagttggatctatttttggacaaaatacattaagttgctgaatatggcttctatgtagagggagggaaaaagtagaggcctactaaatctaggttacatctgttacatctgctttcagaaaaacttagtaataaatgtggctgtcatgttaacgtttggtggttcctaaatgtcattgcaaagactgaagccagtccatggtaaaattttcattggcaagctctgaaatcagaaattagacatcatgaatctttcacaaagctaaatttgttcaattaaatgaaatgatctttattgtgagtttatatccttccaaactttttagttttaaaatgatcttttttaagaggaaatgatggtgacagtagatagtacttgtgttttggatttttaactgtccatatttggaaaagtaaaaagttactgaccaccatactttagtttctaaaacactggagtgcaatctctaaattgcaatgtgtttggggaaaaaaattcaatccctttgcattaggtatttttattgacattagatataagagaatagtataaatttacctaaatacacagaaaaataatctttactctttataatcccaaagaaatattccttagttcttttttcttctatttactatcaatatctatcacaaaagctgatattacatgaaaatattaatataaatgttacaacattatctttcttacgcaggtttgttgtgaggattaaataaattaatatttatgaagaactttgaatcatgcctagcatgtagtatggactcaaatattgctaataatattgacaattttttttgaaattgctcttcttctgtaacactcaatttatgccattggcataaatgttttgagctagacaagatattgctctattcagagttgccctggaataacttgtttctttaatcataactggtacttttttaacctatttaagctttaaattatccagaaataaaacgaggaaaaaagaagaaattaaaaacagtaataaaaccaatttctcagaaagccaaaagataacaacaaaataaactttaactacaaaagtctttttagagaagaaatattcttatccacctcatagcctagactcagtcaagggaaagggcagccaagaatatcttaagtgatatcctgggctttgttttcttgattcaagtagtgttcacattattataattatatattcttttatctgtatatctgtctattcatccatttattcatttgacaaaaattgagtatctgtgtttgagagacacaaagataaataagatatccacatccctccaggaaaatgtagcatctattttataatacttatgaatattactgaagatctaattataaaataaattaaatcatttatcaaatataaattctattaatatgagtttatatgaccacctataatgataacaagtatgagttccctcttttacttttatctggccttccctcaaaagatagagctaactacctagctactgggctgaaaatactgagttattagcctttgtgcatagtaagctggtggtcttagatcagaggtatatggcttttttccaaagacactgtgagatacgcagaacaaaaatcagaaaactataatcttttaaatgaatcatgaagtaccaaaaatgtaaagatctcttaataaaaataacatttaggatagataccatcagaccagttctgtactctgcctatactattttgaaaatcttccttaaagaagctttaactctgatgtttgaagtggctcatacaatgaaaataggtttaaatgcttattaatcacatgtaaattaaacacataacttttgtgttataatcataaagtggatttgctttgtttcatgtttcttcttaaaataatataaagcaaataaatgaaacaaaaatggaggtgtcctctgctaggtctacagttatataaggaaaaccggaaagataacataaaaatctccctaaatcaggtctatacagaaacagatttgctggatttagagagtagataatgcatgtaatctcaaatataaaatatagcaggtgactttttatggggaagttttttcttaatgttgatagtaacatatctgtacttgacattaattaatccatatcgtaaagatttgaaccagagaatcaggcccacttggtcatagaggcagtcaaggaatgggctctccactacaatttgatgtgaattgtctacttatcatgtctcatagttaaaccagatagtttggtagattctttatcacgtgtgtttctaatacaaccaggaaaacctatcgtatattctttttttttttttttttttttgtgagacggagtcttgctttgtcgcccaggctggagtgcggtggcacgatctcggcttactgcaagctccgcctcccaggttcacgccattctcctgtctcaacctcctgagtagctgggaatacaggcttccgccaccatgcccggctaattatttttgtatttttagtagcgacggggtttcaccgtgatagccaggatggtctcgatttcctgacctcgtgatccacccgccttggcctcccaaagtgctgggattacaggcatgagccaccgcgcccagcctatcatatattcttacattctctctcacacaaatgtgcatgcgcacacacacacatgcacacatatacatcattctgacactgccttaactttcagaatacaaggttgagtcctctgccacatactagcagtataatcctggatgagttacttaaacttactttgcttcagtttgaggatgaaatgagagaatatgtgtaagacatctggcacacatagtgagcattcaataaatgttaactataagtaggtgaccagttggggcccaaggagattgtaacttgcttaaggtcattaaggtagttcgtggctaagtcagaattagaatctacataatgattctcaattcaacctcctttatactaagttatctcactaattggcagctctttcctgtgttaactttctgtacatgaagggtttgccttcccaagtaagttgtaagcatctcaaaggttaaaagcattgtgagtgatatcttcatcaaccataggttctaatagagacttcttgctatttgtaggggttcagcatttatttgttaattatgagctttcaacttcacaatagttaacctgaaattgttttattcatcccatttttctcattctgtcttcagtagttctgtatataagaacagcaagccattatcattctcagcataaaattagaattgcactctgcacaactaccatcctctccctctgtaagtcctcagagaaaatcatacaattttctactatatttctgcagtatgaagaaaataatttaatatacctatgctttggtttctccatatacagaacttatatatggcattactcaatcaccaaagaattccattataatttagcttattgttatgtaaattcaggcataacccaggccacaatatgatcccaagaatataacaagtatccatagggaaaacctggtagaataactcaagagtgggaattatttttagctttggatgacttttatataaaggagctccactcacaatacattagtggcactattaactacactcgctagtaagctaatatttgaggtccattttttacatctctttgagagtatatcagtatatcaagcattacaaattactaccttgattgcctttggagctactctttttttgagacagagtcttgctctgtcacccaggctggagtgcagtggcaccatctcagctcactgcaacctccacctcttgggttcaagtgattctcctgcctcagcctcctgagtagctgggattataggcgtgcaccaccatgctcagctaatttttgtatttttagtagagacagggtgtcactatgttggtcaggctgttcttgaacttctgaccttgtgatccacctgcctcggcctcccaaagtgctgggattacaggcatgggccaccgtgcctggcccttaagagccaacctagcatatccttgtaaatcagttgcctaaacaagcttcctcttaaatatgcctttgaaaaatataaattcctctctatcagtatctacatttcactttgaagatcttatcggctttcagcagcaggtgtgcatatcctacaagtttcagttttctcttgatgctcaggatgaactaaacatctagacaagggagcatctgggaagtctgactaactggactacttggactggtttgtcctcacaaaatgtaagacttacaatctgtaggctgttacctagctcctgagagctacctcccccgggccgcccacactagatttttagtcctgagctgcatacccaggaattctcctgtttccgtgaatcaggaaggatatggcaagttaagagagaaggaaagaacctgctgagccttgccttccaagggatatcaggaagttactcaaaagacggcaaagtgctctctacacaaaagtgctggaagaactgcagttatattccctttaggaaaggaaactttaagatgatttggaaatagccaaatgtaatcacataacaaccaattttgaagtttgctggcatgcaacactcctttaggaattcttggtttccagcttggtctcattggcaacaaatagaatttcctaagccttattaggagcctgacattttgtttgagaatcaaaacttttctgtttgaaaactagagccaaactcagttatataaaaacagggatgtaagagaaagagcaaacaaggaaagctattatgttatatgtgtgcagaacataatagtttgaagagggagacttctcgatggaccagaataaatactagaatgtaatacacaactcggttatacaaggtaaaaatgagttactggcccttcaggatgggtatcatgatagctcattaatttaaataactcctaatatgcgtgtagcagtttatcagttagagagtgctttacatgggttgcttttcacaatagataacttagggcaagtgaaggcctgggtctgaaaacatattctgcaaaataagcccctcactgttaaaacctggcaaatgctaaggactccacagctagagcaaatggcttctatagttgaataatctttcaataaagttagaaaaatgggtgtccttcttcaatgcatagcatgttgggaacccaggatactttagaaagtctcttggtccagcactccgacttgtgaaagacaaatattgtcatacaatgctttggctgatctcttatttcttgtcaacctaaggtacagtgggtattaaactcttttagcttcctgaagacaaactaattcccgacctccctgtaataattgctgaacatgggaagttttggggtctgagttttaattccaagtaattcattatgtctgtcattgtctgtggtaggttgcttgcccaccactttgccagtatcattatctgtgacttgaggcaaatggtaaggacagcttgtctgagtctcagcacttgggtggcagatgtgacagagatagataaattggccagagtgagtattttaaaccagaatactgcccccaagcccagtatgggaccatctacagtatggaaggcagctcagacataggtcagtttgttcaggagaccacacattatgatctgttgagctgttcatcattttcacttgaaaatgaggggtggctgtttttaggctgtcagcctcagatttgaattctatagtgattaggtggtgaaatggctgctctctgcagactgctcaggggctgttagagctacacaattgccctaaaatcaacaggagcaaatagcctcaccaaaccagccttgagtcattcctttaagtgagggtgattaggagggtcagctatttttaagaaagaaattcaataatcagtctgtccagagactcaaaattatttatcatggcattttccaatgtcacctttcctcaccatcactttgttggcattaggctttgagacatggttctcaccagcaagatggttatttttatgtcttatcaaggtctctaacaggtcctatgacacgcaaatgttagaaaggagaataaagcaacaattgagtaaagcaatagtacagtgggaagagagacaggaagatgatgttgccatgttttagtttaatataaattgttaatatctttgtctcagtcactgtatagaaataaaatattttcagattaaaagatcctagatcttcattgaatcctacctctcttaacctcagcccttttggaaaacagcacaaactccaaactgtaattcaagctctaaaataaaaggctgggctggatccaaagtgttttcaatatttttctggtagatttttactggtttttcatgaaaagcacttaattcaaatattattcttccatcttttaatgttttagtcaacagtaaatgatactctcttctgatatactcctctcaaagtggtagaagagtttgtggcaaattgccatttcaaccatttattctgctccaataatgcagtattgaatacactgaagcacggaaaaattaactaaactacttttatgcactttcaaaagaagcaacagaaaaacttggcaaagtaataatagtgaaattttattgcttctcaatagattaatatacttaataatatcctagaaaatgctgcactttgaaattttaacatgtaacagtgtatatcttaaattaaaaataactgtatagtccagggtggttatttatactttatatagtctatattctttgtgagatttgggtttaaacacatcagagtttaaattctgcgaagactgcagagtaaagaagattaagatggagggaaggaggaagagcaggaagagggaaagtaggtatagaggaagaagagaaaaggagatagtagaaaggggaaaggaagatggcagggaggaaggagaaatacctcaagtccatgaggggttagtgctgaaggataccttcatcattaagtaaagggtgaattgcactgggttgtttaaaagcatgcccagatactgctgggtgcggtggctcacgcctgtaatcccagcactttgggaggccaaggtgggcagatcatgaggtcaggagatcgagaccattgtggctaacacggtgaaaccctgtctctactaaaaatacaaaaaattagccgggcgtggtggtgggggcgtgtaatcccagctactcgggaggtgaggcaggagaatggcgtcaaccccggaggcggagcttgcagttagccgagatggcgccactgcactacagactgggcgacagagcgagactccgtctcaaaacaacaaacaaacaaacgaacaaaaacaaaaaaaaagcatgcccagatacaatcctaaagtatgcccagatacaatcctaatgcaaaattttatcagatggaaaagtatcaaaagctggaataaatagaaaaaggagttcatgaaatgtattcaaagaaattttaaaaatagctcaggtacagaatctgttaaagcaacaaagcagacacatgactcttcttaatcttccacacttgactccacggcattaagttaacacttccttagtctcctctgagttgagacaaatttcctgaaaggaaggttgacattccctggacactttaaggatctgtttgtgcctcatgggtataggttgtaaaagttctttgcatagatatgtcagcattttagtgcattgtttggctccaagtgacctttcctccctgcatttcctcatttgccattcatcttcttgcttcccttcgtctgccataatagtccctggggtatagtataagtgcttctagggcactcctctaactgcacggttattgttactgcacaattaaaggacttagatattgaaaaatggtagtgtttggaattctgcaatctcattccttaggggcagggaacaattggaacacctaaaaaagggtcagagtccagaaccagattcaggagagagttcagctttcaattgggttggtccatttttcagtgctgcccgcacgagctgtcagttgctggaactgcagagtatttcaaggaaaggcgcggctaagcagaggtgaaatctttagacagatgagtctcaaagaggaaattatgcagaagccaaatggctacaaatggtactgaggattgaaacctaaactataagtgaaggtctcttccctaaatgatacactcagacttaacaataagctaataaggtggttcaataaagaaaatgtgggtctgatggaagagtagagagtttagaaggtgagtaagagatatctatgatattagcttgggtgtgtttttggtattgatgccattgtgttgggagtacagcagaaggacaaagaactcctttagcaacttggcctgcagtcaaataggccaacattggaatctgagctccactgccttcttcacctgggactaatcacttaccctctcagtctcctcatctgtaaaaaaaaaaggataataataataataattgttacctttggaaaattacacctttctcttctgtacctttaacctttctctcaactagatactttccatgagactcaaaatacattcaagtgtcttctgcattaaaaacaaacaaaacaaaaacctcaccttcaaccacttatttccctatgttagggtttctcttgacgtttggggctagataattctttactttggggctgttctgtgcgttttgggatatttagcagcattctttacccatgaaaatattgtgtccctcgccccacaagttgtggcaatcaaagttgtctctagacattgccaaatatctcctggaaagatgcccaccccccaccccagttaggaaccactattctaatgactgcctcatctcttgtctcccttgcaaagccacacttgcccagttttgcctattctctctagctatattcctcacttccctatcacagccgatcctattctagtctgtctcttgttcccattttaccaataaaatcatttttagtaagaagaacaataacctggatagttctaaatgtaatgaatattgcaattcttctcttccttgatttctcacaatttgaagtgtgttcttctcctggctcctctgacactattctctctcggcttgatctgtgaagcctgggtctcctggaatagctgcagcctttctctccactttcttaccatattctctcactgtgtccaggacactagctcagactttttcaaatgctgattaaagggcttccatgctgacagagggcaaacctcacagagcaagcttttcttaagcttttgcttatatcacatttgctagcactctcttggccaatgcccagagtcacatgggaagagcctactgaaggcagaaatacagagagagaagacttttggcataacatcttgagggcttcctttaacccactccccagtaaaactagtgaaaactatgatcaaacaaataaaaactccaagcacttaaatcctctggaaatgatcctaaggacaaatagcaaatgaagaaacatctattcaagaacatttatgaaaattcaataagaaaggcaagcctgtggtatttaaaccaagactgctccctctcacccccttccaagttcagggagatggagcttccattccaggctggtgcaatcaagaacacagagctctctcccctccagctggaaggtttcttcctggaaggaacagaacttcagtgtttctcatcctggccatagttacccattgctaaggctaagctctggtgaatacagtagagaggtaggggcttcctcccctgccaaatcccccatcattgaatggaggggataccttaggcactgcatgctaagaatacagaggcctcatcatccttgcctggcctcctgaggtgggggttccacaccaggagagataaatatagaagatattagagtgctgccacctcccaactaagctaagctcctagagtgggagtttcatgcagtcatgcaggaagaacctctccattttctccacctccatcttgagaaacatggcttagagattttgcctggtggtggcgggggcaataatccatcataaaataaatattcttaatctcttcccaaagggcatggcttcatttgcaacaaagtatggaaaagttcaagccttagagtgcgctcaagaacagtggaagctatggtgaaaggcaattgggaggagagtcaagatacaggctaaattgcagactagtttgcaggagagaaccagagaaataacacagctgggaggagccctgacttcgaactatttcttcaaaggagacacaattcgattgtattagtgtgttgaacaatataaggttgtaaagcactgttgaaaataacacagcaattgttcaccaattagtggagttgaacagctgaatgtggttaaggaaagagtgaaggacaatcacacgaacatcactctcatgccggctgggctgtctgtggacatacccaaagatgtacctccctgatagcaaactcagtgacttaactgagggaaattaactcacctgactgtgaaggaaatatacttattaaaataatccagcccctcactaaacaaccaaagaataatagcaagccctgggtggtggtagggggagtaagaagagttgctacagtatattatctgcaatatccactttccaaccaaagatcacaaagcatggaaagaaacaaaaaatataacccatacacaggataaaagaaccagatggcagaaactatgggtgagagggacccagatgttggatttaatagagagatggagaggagaatgaatgcagccagtgtgcaatgtgtcatgtcctctaaatgttcaagtccctcaagtcatagatccacctattttttctcaagttaatatctctacacctagttttaattccctgtcatgtatacaggactcacacattttatcttcaacttaggccttccctctgagctccggacctgtgtatcattcagcctttttgaaatctctatccatatgtctcaaaggcacttttgattaaatactaccaaaaattaactccctctatctcccagtgttctctatttcagtgaatgataccatcaaacatctactttcaaaatcaaaactctgagataaatctctaacagctccctgcttatcaccccaccccatcatattgaaaaccaaacccatttaaatacctttcgtttgtgtcctcctctctctacctccaccaccagtactgtagtgtaatctgccatcatctctcacatggattactgcacaagtctcctatctggtgcccaaattaggagcaccctcctaactggtatccaatctaatctctacactgtagccagaaaaaatcctttgaaattcaaatctaatcatggtatgtgcctcccccttcttctatggagaccataggaaagaaaccgaaactcctgtggtgcttgagttgatgctagtaacctctaaacctcatttcatgcctggatctgtcacttcctgaagctccatgataaagcacagcctcctcaccctccaagtgcgggggttctctagttgtctcttccaggtgccaccagagggacttctctcataaaaggcctgtgcaccctatgctctttctctctctgttatggacttccttccagagagctggtccccattccttgatatgggactgtccacttgtatgagtaataaaaatccttctctgatcataccaaagaattggtgtcatgagtttttatattagaagctaaacttgagagggaacttccccatgtcacagtgaaggtgtgatgataccctctttctaccatctttaaattcttccgtcgcttccattccattttctcttaggataaagttcacaatccttaggttggcctacaaggtcctctacagttaggtacccccgtctgctttccttccttccttcacattagttatgctccccactgcctgaaaacatgcagacctgctgcatcctctacctgaaatactcttctcctcacccctgccagactttacctaatttgcccttcgtttgtctttgtaacaccgctcagaaatctcttcctcagaaaggccttctctgacacctcagcacagtcctcctcacgaggtcagatgtattttttcttcaaggcactgactttggtttaaaatttgtatttattcatgtaattatttggagtgcatttatcttcctcactagatataatcaccattagctcaagggctttatatgttttgcttgccattgtgtcctcagtgcctaggccattcactgacccacagtaggtgctctgataaatatttgttgagtgtagaataaatgaagacccttagaagcataaaatatataatctcaaagcagaagatactttagttagaataagttaggttcaactatattaacactccttactacacacacacatagctacactcatcaattttggtggcttacaccaaaaaggcttatttcttgtgcacactgcattcttgtgctttaacaggatactccgccctacctcatctttattacagaccttggctgacggaggctaccacttggaatattgtctattttcaaagtccagcagaagagaagttaagaagggtttcactctggcaattaaatattccagctaggaaatgacatactttatcttcatatacaatccattggccataactagtctcatggtcctgcccatttgtaaaggggaaataggtaatcatctcatgcattgaggaggaaagaagaattagatacatgtgaccagtagaagtctccttactgacattttaatgtagagctgtatgtgattaaagttaaaattgaatctgaagggctgacagaaaaattcaagaggatatgatatttaataattgaacgaggctgaaagatgaaatttggacagattgaatgggtaggccttgctagcaggaaagacaaaataaacataatcaagaagtatgtatgaacgtgtgcccagggcagtgaggagtgatcagcctccttgaagtggaggatgtgtgtcaaggaaccagaggagatgattagagtggcagacctgattattagcatatccatgcttctgtctgaagcctttttggcctataatgtagaaatatccttggagtaagcagttcagcatatggttttagacatataggtcatcttggctggattgcatattcttcatttttaaaattccaggctgtattggttgatatgcagtccagaaagagctggatctgacttaagaaaataaaaactgctttaatccctcttttcagcccattgtctatccattagcaggtaaacaccagtgtccctgcaagtgtgtgaactgagcttccttaatttcacctttaattggcacttctagtgacttaactgagtgaagagacccttagcaatgatacaaagtgaaggatggtatagaataataggttttctgaaaacctgaatgcaattgaagggtgctatttaataaatctgtccctagaagctaatagcacgtagtcaatacaatttagcctattttctcccatgttacatttgttagttgtactggttttggaaaaggaaaagtcatgctgttacagttccactaatagaaaacagataatttgggaggaaattagattggaataaaagcacgttgttaaacaagaaatcacaataaagtattgagtagagagaaaccgttaatggagacagctatgtcatacctaatatgccctcttttcattgatccttagaggaagcataagatcgcagctaagtatggtctcttgagccagcctgccatgattcaaattgaaactccatcattcaccactgtgtgaccttgagaaagttatgtaatcattcttggatagtgattcttactgctatggacagatttgtgttccccccaaattcaaatgttgaggcaactgtgtgaggagagagggcctttaggaggtaaagttaaatgaagtcataaatgtagggtcttaattcaataggattagtggccttataagaaggggaagagttttctctttttctttctctacttgcctgcaccagggaaagtccttgtgaggacacagtgagaaggtagctatctgcaaactggaaaagagtcttcaccagaacctgaccatgctgacacacagatctcagacttgcagcctctagaactgtgagaaaataaatgttgtttaactacccattctatggtattttgttatgacaacctaagctgactaatacactcacctataaagcagggataataacagtgcctatatgatagtgtgtttacaaggatttaatatatgttagtttatattattttatgtccatatatgttagcgtatatattattttatgtctatctctaattcctcattgaggatacttaagaattctactttccatgtttgacagacctggtttggatttcagttccacctcttgtaaactctattaccttgagccagtgactaatgtatctaagcctccattttcctatctgtaaatggggatgataactagtgctgcttgtctcttcaggttgttgtgaggattaaaggagatatgcatgacaattcatctgccaggtagtaagcattccaaatatgctatttactgccatcattagaggtttgctgagcttcctcttttgcattaagtaagagactattctctccagaaaactttgaactacatgatggaggaacaaataatagcagtttctcctcaaccttggaactctaaaaatgttttttctaagccattcttatctttattttgtcattaaaagatacatgcattgtgcattttgcttttatttaatatatgccatgagtgtctttctccctatcatgatgtcaatgttacattacagattctaaggagcaggggccatatcccttaaacatgatttatttaaaataacaatataggattggatgtgactactgcttttgcaatgaaactgaaagatgggagagtgagatttttctcacagctatggagtggcagacctgagcactaaaatccagtctcagaacccagttattatctcacaatgtgaaggcaggaatctatagacagattattgaacatctcatgtatcatatcatgtatatcattaagcttatatgtatgacaaaatagtattttgtgcagcagtgcttctcaaacattaataaatgaatcacctgaggatcacattaaaattcagatgctgatcagggagtctagaatgggactgaagtgctgcatttcttttctttttttttagactttaagttttagggtacatgtgcacaacatgcaggttagttacatatgtatacacgtgccacgttggtgtgctgcacccattaactcgtcatttaacattaggtatatctcctaatgctatccctcccccttccccctaccccacaacaggccccggtgtgtaatgttccccttcccgtgtccatgtgttctcattgttcaattcccacctatgagtgagaacatgcggtgtttggttttttgtccttgcgatagtttgctgagaatgatggtttacaccgttggtgggactgtaaactagttcaaccatcatggaagtcagtgtggcaattcctcagggatctagaactagaaataccatttgacccagccattctgttactgggtatatacccaaaggattataaaacatgctgctataaagacacatgcacaggtatgtttattgtggcactattcacaatagcaaagacttggaaccaacccaaatgtccaccaatgatagactggattaagaaaatgtggcacatatacaccatggaatactatgcagccataaaaaatgatgagttcatgtcctttgtagggacatggatgaagtgctgcatttctaacaagctcctaaacgatgctaaatctgctggtcctcagactactctttaagtaacaaggatatagttggttttagcaatagtgacttaaagattttttgctatttttgtttttatctacccatttttgtattcactaaaatgtgttctggatgcaaacttctttaatacaaagggaaaataaattaaaagccaactttgcaagaattgaattacacacattttaaacttaaaatgcttcggttcatttctctgtatgttgtgtattcctaaatcattcacaatgtctttattttttaccccttttttatcaaatgaggaagtagtactcctctgacttttttcagtttttatcttccataacacattaaatcacctcaaccttcctaaaaagctctccttgttttctgacttttaactgtcttgagtctccatttctcaacccctaagtcatgcccaaatcctgttctctgacattttctcatctctcttactttcttctccttgggaactcccatccactgccacatattcaaacattaaattcagctctctatacacttctgcatcagtgtctttcattccaaagtcttttctaagttttattcttctatgcccaatggattggatacttatgacctcacagccctttaaactcaacatgtcaaaaaccagaattcatatacttcttactgttaggccccaagccatctgcccacaaccaccaggttatattgttccctttatcaaaattttcagtgattatatttacggtggaataaatttttaactctttattctgacattgaaaattgtcgtctctccaacttcaatatttttttgtacctatatcttccattgcttttaaatatgtggttgacttaagtttgcctgaatcctgtttccagaatgtgcctggaaactcccaacctccatgccatttcactctgaatctaaagatctcgtaccaatctttgcttattcaaatgttgcatatcttttaaggcctacacgaaatgctacaacttttgtggtatattctctaatcccttacctgaaagtgattggtccctcctctgcactgctataatgcatattctttgctatttagaagacagcccatgctgcactatatattatagatctatgcaaatatctgccactatctgaaacttcaaggctccatctcttctccattattcctccaaacaccactcacagcaggttgttgtcagtaataaaattttattgaaagttttggggattatgcagggcaattatagcagaagcaggaatcaactggaattagagtgatagaaccacagcccttagacatgtatcagacactccctgaccaagtctgtccatggacacagaactcctcacctccagatacttcctcttgcatctcttctaccagtatcataaccctcacaaaaatgacaaaactcaatgccttttacttcgttatgcagtaatttcccctcttttgttactgtttaaactttccagcgctttgagaggccaaggtgggcggatcacctgaagtcaagagtttgagaccagcctggccaacatggtaaaaccctgtctctactaaaaatacaaaaattagccaggtatggtggccagtgcctggaggctggggcaggagaatcgtttgagcctgggaggcggaagttgcagtgagctgagatggtaccactgcactccagcctggaggatagattgagactctgtctcaaaaaaaataaaaagaaaaagaaaaccctcaccttctataatcaaataggtttttaagtgttttcctaagcttgatagcacttcagtctctcagaggaattctgcagtcctgcagttgtcttgggtcaaccagccaaaagttaactaatttgcataatggcagccccataaaatgcgcaaaattattatcttttatatgaatgcttattaatatatatatatatatatatctccttttacatctatctagaaaacgttttaagggaagaatcatatagcttcaaacatttttgttaattacaatatggaagaaaagagagttcaattccttaatctatcatgtgtgagttaggggactttaagcaagttattttcttaggaatcctgtttcctgacctatcaaatgaatgtaagaatagctacctcacataagtgtgaggacatagataatttctataaaatcatttagttagagtcttggcacatagtaggagccctgctctcagtacaagtttaaaatgtctgttgaatgctaaaagattactccattgagctttttcaaactttaaagtgagtatagtgtttcactgtaggattccaaaagctgtttgatgctatgatttctttctcaacatcatgtttactctgaagacatttccatagtgttctacccttaattgaacagagataggaaatcacgactttaaaactttcagcgttaagagtaaatgacacattagtttagagacatatcaataattatggaagtatcttctcaaactgtaatgttttcctctgccttagtgctagcaatcaaatccactgaattaatctgagcagggtcaggactttgaacctgaggaaaatcacttgaatttgaggcattaagtgtgcagtacaaggtgttccagctacaaattttctgaatcctatttcaaagcaatggtgcaggagaccagatagccacctcaaaacttctgagtcccatagtgttttggtatggctccagaagcctgttgctgccccagaaaagggagatttcaccatttctaaagggttagctgctccctggggatgacagataggtggcaaaaattggaatgtagaaattttccttatgttctaaaattgcacagaaattttctagggaaatattctttatagatttcccaattttgttgactaatctcttcatctgaaatgtttccctccatgtatgaattttctctctgtctttctaagtccagtgtagaatcgatttggtatctaccgactttccagattcctccaagttgggataaatcatcatttcctcctctgtgttcctagtgcatagaaataaaatcatttatcacaatctttggttactgatgatggtggggaggtctttacagtgtgatggcttgaagtacaaagtacaaacttgaaagtcagattaccacttactttggaccttaggcaggttacttaaccccactctgcctcagtttcctcacctgaggacttaataatagtagctaagcaaatgaacttactaatagtagctactttatgatttttattaggattaaatgtaatggtgcatatgaaattagtaaacaagagttgcaaagtagaaaactgtcagtgaatgtcagctctctctattatccctcagagactcctcctgccactttaggtagaaagctccttaataattgtgaccataacatgtttatttctttgttggtatagtcagtgctcaatacattatctgttgagttgaactgcatttttgacaggagacaacttaagttataaaaatcctattttctatttatactatcataaaagtcgtgatggctatgcttttaacacttgacctacctgaatgtggatggtttctaaaagtaaaataccttttaatgctgtttagagtgtatggcaggatcagaaaggcatatgtgccatggcttgaatatttgtcttctctaaaactcatgttaagatttaatccatggccgcgccccacagtggctcaggcctgtaatcccagcactttgggaggccaaggcgggcagattacgaggtcaggagatcaagaccatcctggctaacacggtgaaaccccatctctgctaaaatcacaaaaaattagccgggtatggtggcaggtgcctgtagtcctagctactcaggaggctgaggcaggagaatggtgtgaacctgggaggcggagcttgcagtgagctgagattgcaccactgcactccagcctgggcgacagagtgagactccgtctcaaaaaagaaaaaaaaaaaaaaaaaagaagaagaagaaaagtgtcagtatagagaagtgagacctttaagaggtgattgggtcatgagggttctgctctcaagaatagattaattgatttctggattaataggttttcatgggattgggactggaaggagaggaagagagacctgagctggcatgctcagtccccttgccatgtgaaaccttgtgccaactttggactctgtggagggtccccaccagcaagaaggtgctcaccagatgcagccccttgaccttagatttcttagcctccgtaactgtaagaaagtttcaggtattctgttataagcaacagaaaatggactaggcagcatgtaaaccaaattaatcaacatacacaaatttttgtagcactattttactcttttatataacaaataaagccttaaaacaaatactattttgaaagaaacttacatgaaatggtcataagcataatttaaactttaaaattacatatgtaaagttttcattgtccaaacatgttgatagacaaaatggaaaagataaatagtttgtacagttctctcttcttgaaaagtattgctttgattaaaattcatattgtcccaacattgtttaattcataaatagtaaaataaatatggaacatttttttcaatgcagtatttgttttccttgaaagctttcaaaagggagagacaagaatccccagaatattagaaatctttcatatttttattacaatcactgtaatcctgaatatttttttctagcttgaagcctaaaattaccagtactttaatatacaagatgaaagtttgtttactcataccactgcatattattgtttgaaacaatcatttctggcaatagtcatacctctgcgtattattgtttcaaacaatcatttctttcaatgactctaaataaaaaattcctgcttctctttaaaaagacagtgggaataagtttctctccttgagcaatggggcccctactctgcctggttttcttcccctttcttagcacagacaccactggaagagctgagccctcatttaagattgattctatattagtttcctaaggattctttaacaaatgactgtaagctgggtggtttaaaacaacagaaatttattctctcacagctctggaggtcagaagcctaaaatcaaggtgttagcaggacttgttggttctggagactttaggaaagagtcctttccttgcctctctccttgcttctgttgattccaggcattccttaacttgtggcatcataactccaatctgagttgatggaagtagagatctccatcagtacatggtctttttctctctctgattctcttcacttcttctgttctcttctaagggcacttatcattggatttaaactccaccctaatccaggatgatttcaccttgagatccttaattgaattacatctgcaaagatcctttttccaaataagttcacatttacaggttccagatggacatatatgttatggggccggtttttttttttttttttttttttggagacggagtctcgctctgttgcccagactggaagtgcagtggcacgatctcggctcactgcaagctccgcctcccgggttcacgccattctcctgcctcagcctcccgagtagctgggactacaggcgatggggccgatttttaatccactaacaggtaccttgagactagggctcactatactttggtcagagatgctctaggcatgaagattatatttgcatgaagctaacattttttcaagactacgtgattgcactgctcaaacttacattatggtttccagagacagctagagcttccttgttcattaactttgaaaggaagcattttccctgggaagaggtgcccaagcctcttttgtaaggtgggcttgtcttaggcagtaactaagcctagagtcaggtctactaataatccattaagatgctgtgttagaaaaatcctctccaaatatgatggaaataagtatgtataagaagtatttcacagatgaacacattcccactttattaaccaagtgcctgtgtgcttgcttaaatttttcacattttcagacacttaacatattatagaaaataacatccaaagagaacatgatgtttagctttttggattctttgggataaagagcaaaccaattttgaattaaaaaaaaaaagactgtagataccacatccttaaataactcaaaagttttgtaccaaaggctactttttaaagttgaatcaaaatgaaataggtgtgaacacctatgttttgagaggcagagaaattggtttttttaaaaaagtgggaataagtgagtattttttaaaattgaaaagggtgtagattgggttcctcagagattgctaaagctgatatcataaattacctaaggacagggagaatgaagtgaattgtgtaaatgtctacaatattatacttttcttgcttatactaagctaaactagtatggatgacatgtagtaaaagttataaaaggaaattcatcttcacctgtgtacatgcaaaactgctgcatttgcagattaagtcaaaattatatatagagagagacacacacacacataacacacacacacatatattgaaaatctttaagtacatctaattttttatgactcagaaaagaatccttatttaagccctttttactacagcaaaaaatgttaatgtccattaaattaatggactttgctctgatttggggatgataattgcagaaatgagtagggatatatatatgatctaatatatagaaatggatatatagaatatatatgtatatagaatatatagaaatttctaatatatagaaatttctaatatatagaaatggagcattttaaggtctggaactttggggctgtcaacagttataagaaaatataaagagagatatatacagagagagtaataacaggtagtcccaggagtaggacaggagattagtggcccagaatcaataccatatttgttctatttcatctttttgcaagacaaaatagatacccagggggctggggaaggtgaccagtaagttacttccattattttctttttctttttcttttttttgagatggagtctcactgtgttgcccaggctggagtgcagaggcacaatctcggctcactgcgacctccaccgcctgggttcaagtgattctcctgtctcagccccccgactagctgggattataggcgcgcaccaccacacctggctaatttttgtattttcggtagagacggtgtctcaggatgttggccaggctggtctcaaactcctgacctcaggtcatctgcccacctcagcctcccctattactttcttcctttatccttttctactgtttaaaagctcaaaacttgttgaaactccctctccatcagattctgtgtgcccaaagaactgtccttggaggagagtttcaaatgtctttcattttaatgtctggccttggtgattgtttaagaagtcccctgaatgaatttttgggtgaactcggggcctagactggctcaggaaatctggcactgagccccatatttactttggccaaacacaatacttgctgtgcagccacattcactatgcactgctcacaccacgcagcttgagagctttgtccctgattcaaatctgctgggtattattcagtctgaaaatttacttttacaccaagcatataaacaaaatgaaatacagtttaagaaatcagctcataacatttacaattaaattcattaatcaaggcagcttatggaaatgccacatgtgaactgtaaactttataaatattcaagtagtgaacaactagacaatcacattggcagctttgtttcagtataagtgatgtagaatattaccatccatcagcttgcagttttgttttaaaacttgttgaaccatgtatatcatcaaaaagaacttttggttacatttctgtttccatatgtttcccatttaccttcctctctagatttatgtgccttcgtactaattagcacctgcactgaattcagaaagcagcacttgaatcaaaccaagtcaagctgtctgtgaaggaaaaaaataccaagttccaagatttcttgttaatggagatgaacagtacactttgttgatgttcttattcacatgtgtcttcttaaagtatgagaatttagtatatgttctttcagtatatgcaaatatatccacatgggtattttcaaactatgctgcagtgtgctttgtctggttaccagtttttattctagtacaagaatgcaggatgttattcgtcacattcacactatattaatttaacctcctaggtctgggaggagagaggaggaaaattaaaggaggcccaagctttgcatttgagagaaaaagtgaactgggtcttgaaagatgtcttaagaaacaaaagagagaaagaaaatagaggaaatgttagaagttgaggtaaaagtgtgtcatggagtaaagaagagcatggagagaatactattagtcaagagaaactgcagctcaaacactcaaatgcagaagcatcataaacaagctaaattccactcttcctttagttcatgtgttttggtctatgtaagctgaagacaaactctcctttttccatgctcccatacctcatagaatgtgtttggaagtattctctcctcttctatttttcagaataaattgggaaaattggtattacttctttaaatgtttggtaaaatgcagcagtgaggccatcagatcctgggcttttctttgctgggagactgtttattattactttgatctcattacttactattggtctatttggattttggacttcatggttcaatcttggtaggttgtatgtgtctaggaatttattcatttcttctagcttttccaatttactgccatgtagttgcttatagtagcctctaatgatacttctaatttcagcagtatcagttgtaatgtacccttcttcatctctgattttatttatttgtgtcttcttattaagatgctatgttagaaaaatcctgtcagagtctggctaaaggtttgtcaattttgtttatcttttcaaaaaatcaactttttatttcactgatcctttgtattgttttcttcatttcaatttcatttacttctgcactgatcttgatcattccttttcttctgctcgtttttggtttggtttgatcttgcttttctagttctttcaggtgcatcattagggttttttgtttttgaagtttttcttctttttttgatatagggtataaactgccctcttattactgcttgcaactgtacccgttaggttttggtatgtttctgtttccataaccatttgtttcaagaaatgtttcaatttccttaatttcctcattgactcactgctcattcaggagcatattgtttaatttctatgtgtttgtttagtttccaaaattcctcttattgatttctagttttgttctattgtggtcagagaagatactttctattatttcaattttttttaatgttttaagacttattttgtggcctaacatgtggtctatccttaagactgattcatgtgctgaggaaaaaaatatgtattctgcagccattgatgaaatcttctgtaaatatctattagttccatttggtctatcatgctgatcaagtccgatgtttctttgttgaactcctgtctaaatgatgtgtccaatgctgaaagtggagtgttgaactctccagctattattgtattggggtctacctctctctctagctctaataatatttgctttatatatgtggatgctctagtgttgagtgcatatatatttacaattcttatatcttcttgctgaattgacccttttatccttatatagtgaccatgtagtctctttttatagtttttgtcctgaaatttattttgtctgatataactgtaactattcctgttcttttttggtttccatttacgtggaatatatttatctatccctttattttcagtacatgtgtgtctttatcagcgaagtgcatttcttgtaggcaacagattgttgggtcctgttgttttatccattcaactactctgtgtatttactggggagtttagtccattgatattcaatattagcattggtaagaaagaacttactctgccattttgttgttttctggttgctttgttttcttctttcttctttccttccttcctgtcttcattttagtaaaggtgattttctctgctagtatgtttttaatttcttgaattttattttttgtgtatcagttgtatgttttttgatttgaggttactacaaggtttagaaatatcatatcataactgattattttaagctgacgacaaattaaaactgattgcataaacaaacagacaaggaaagagaaaagtaataattttacactttwactttgtcctcctactttctactttttaactttcattgtttcttttttttttgagatgcagtctcgctctgttgcccaggctggagtgcagtggcgtgatcttggctcactgcaagctctgcctcctgggttcacgccattctcctgcctcagcctcctgagtagctgggactacaggcgcccaccaccacacccagctaattttttgtatttttagtagagacggggtttcaccatgttagccaggatggtctcaatctcctgacctcgtgatctgcccgcttcagcctcccaaagtgctgggattagagacatgagccactatgcctggctgtagttattatttttgattggtttgtcttttagtctttctactcaagatattagtagtttaaacatcgcaattataatgttatactatcctgcgtttctctgcatatttactatcatcagtgagttttgtatttttaattgattcttattgctcattaatgtccttttcttaagaaatccctttagcatttcttataggacaggtctgttgttgatgacatatcaacttttgcttgtctcagaaagtctttatatctccatgcatgaaggatatttttgctggatatactattctagaataagaggtgagatcttttttttttttttttccacactttgtgtatgtcataccactctctgctgtcagacattttggagcgccactatatattatttgtttattttctcctgttgcttttagagtcctttctttatctttgacctttgggagtttgattattaaatgccttgaggtagtcttctttgggttaaatctgcttggtgttctataaccttcttgtacttgaatattgatataattccctagctttgggaagttctctgttattatccctttgaatacactttttatccctatgtctctctccaccttctctttagggccaataactcttagatttgcccttcagaggctattttctagatcttgagcttgtgtttcatttttgtttgtttgtttttctttcttttgtctcttctgactgtgtactttcaaataacctgtctttaagctcactaattctgttttctccttgataattctgccattaagagactctgatgcatgtaaattacacttttcaactacagaatttctgcctgattctttttatttcaatctatttgttaaatttatctgatagcattctgacttctttctctgtattatcttgagtttcactgagttttctcaaaacagctattttgaattttctgtttgagaggacacatctctgtctttccaggattggtcactggagccttatttaatttgtttggtgagatcacgttttccttggtggtcttgatgcttgtgcgtgttcatcagtgtctgggcgttgaagagttaagtatttagtgtagtctttgcagcctgggcttgtttgtacctgcctttcttgggatggttttccaggttttcaaagagacttggatattgtgatctaagtttttgttcactgcagctatgtctgcattagggggcaccccaagaccagtaatgccatggctcttgctgacccatggaggtgtccccgcttggtgttcttgaataagatccagaagaattctctggattactaggcagagattcttgtcctcttcttttactttctaccaaacaaatggggtctgtctctctctctctgtcttgagctacctggagcttggggaggggtgacactagcacccttgtggccaccaccactgggatggcgctgggtcagacctgaagccaacacagcattggatctctctcaaggcctgcaatgaccagtacctggctactgcatatgtttgctcaaggtcctaaggctctacaatcagcaggtagcatagccaacaaggcttgtatctgtcccttcaggacatcaagttcccctttgccctaggagaatccagagatgccatatgggagccaggacctgaagtgagaaatcttaagaagctacctggtgttctattttacgtgactgacctggcaccaaagctataagacaaagacctccccgttcttccctcccttttctaaaagcagaggagactttccctgaggctaccaccaccctagacctatggcaagtgctgcctggctactgccagtgtttactcaagatccagtagctcttcagtcagcttgtggtaagtgaaaccaggcctgagattctcccttcagagcagtgggctacccttttgctgagggcaggttcataactgctgtccgagagccagggcctggaatgggagatcccaagggcctgcttggtactctaccctactgtggctgagctggagcctaagctaaaagacaaagtcctctttacccttctttctccttttctcaagcagaagcagtcttttcccataactactacagctgggaatgttctgggtcacacctgaagccagcatttctcagtctcaccccaggcccacagtgagtaccacctggctattgctgctgattattcaggggccaagggctctttagtcagcagatgatgaatgctgccaggactgcttccttcccttcaaggcagcaggttcccttttggtccagggtatttctaaaaatgtcatccaggaggtaaggcctgtaatggtgggctcatgactctgccttttgccctatcctaccatggataagctggtatccaaattgcaagacaaaggcctctactcttccctctcctctccttaggtggagggaaggagtctcacctgcagctgcaagctgctctgcctagggttgggggtggggtggcacaagcactcctttggctgcccctgctagtgtctcactaggtcacatgtcccccataaacactaattctaaacccatcccagcatcagtacttgcccaggaatttcagtctttgtggcttagactgtcgttcaagtttatttagtaccccagaacactttaacttatggcagtgaggcttgctggatttcagattctgactgctggaatgggcaatttcactctggctagggctggtctatattctccctccactggcgctagctgagttctgcccagtgttgctttccactgtgacagggcagcactgagttccaaagcaaagtcccccagtcgctgcactctccctyccccgagcacaaagattcactctctgtgccacgtggccactgctgacgcatgggggaggggtggcatcggccattcaagactttctttcctaccctcttcagtgcctttttcactgatatatagcttaaaccaggtacagagattgctcacctgatttttggttcttagatggtacctttttgtgtggatcattgttaaattttgtattcctacaaggaggatgattggtggaggcttctatttggtcatcttgctctgcctttccaaaataatttttattctgtaacatgttgccctgttacccacaaaattgataaaccagacttccttatcttcacccaggttgttggttaaaatgcaaaattagaattctggatgtcctttgaatcatgtttccaggttaatctcaagctattaatcaatactgtctgagtacagtatttaaccagcaaccagcaattaatctacccaagagactatcatcaacatcacatttcaaacaacaaaaatcaatgatatggttacaacaaaaatcagtgatatatttaatagtccatgttttttttctataaatcaatattgcgtatctggcactgtagtactcatatctatcccatttcttttgttgaaattctcaataacctcaacttttgatttcaaatgttaggccttattatatttaatgagaattaacactacttaataatgttcatattatatgaatggccattatgctgttttcgtgttttaaaaaaagtttgcaaaaaacattaattttttgcctaaattattttgaacattagacatgttatattttagcaaccctaataataataatttttaattattacacttaatatcctgcccactttgaaatattgacatcatagagcttatgtatgagacaggtaattaagtagttaacatttagtaaggatgttttatgtggcaggtactattcttagcattatacacccattaccgtacttaatgttcacaccaacactatgaggtagacactttttttaatatactttaagttctagggtacatgtgcacaacgtgcaggtttgttacataggtatacattgccatgttggtttactgcacccattaactcgtcatttacattaggtatatctcctaatgctttccctccccctcccccctccccccaccacatgacaggccccagtgtgtgatgttccccttcctgtgtccaagtgttctcattgttcagttcccacctatgagtgagaacatgcagtgtttggttttctgtccttgctatactttgctcagaatgatggtttccagtttcatccgtgtccctacaaagttattatcctttccagatgaagaaactgaagttcagagaagttaagtggcttaccaaaagtcacacgaccaggattcaagcctggataatgtggctccagggtctgttcccctaaccactatttcataataaggactatcttccaactaactctgtatgttacatactgctagttcaaagccaggtagacgaaaaaatactccctgtttcagctgaagaaggttttccaatatatttttagctgcaaatataaaataccacaaagccaatttacattaaaggagaattgtacattcaacacatcagcatttccacaggattgtagaataatatattagaacaaaaatagtgtttgtaatagaaatacagttattttactttggagaatgggcttggaaatggcagagataagaattataagttatttataattagcttaataatttcggtattcttatctgcagccatacagagttatgtgagttgtgaactgggataggacattaaagctgacagggttacatctggatcagaaacaagacaaaaaagatatgcctcttcatgagcctcatcaatgccccagcatatattgttattgctagcacaacattagggttttgtctaaattttacttatggttttagtgtattttaaaatatttaaacaataaattttattttacataatctcaattcaagatttcatacttatatcttttgttatcagagaatattaattaaaatttaccatgtacatagaagaaatagatatataatatgcctcatttaataatagggctatgttattataacaaagcatctgctctgtctttctctcaacagaccaaattaatctttgccacattattccttggacatttgagaggttaaaatatatgcgcatatacatgtaaaaccaatttgaaaaataaaagttcccaaatgtttattcagtgtctactttgtggcaggcactgacctgagggccgaagaaaaatagggagggtctttcccacaagaaggaagaaaaggaacagatggtgcatgattaccaggttcagtggtttgcatggagtgctcttcaagcactgataaaaagtgtctaaatcagattagatggaacaatgtcagatatggcttttagaggatgtgaatctgacctcaatttgagaatgggtagtagttacctacatagggatgaccatttatgcataaagtacagatacagttaatcccactttttgataatgagggcctggaattctttcatatctaatgaaagaataaacctcctagaaagtccatgcagattgtatggtacacattttaattggtgcctaagaatgactgtagttggagaaaggaaggtgaaaactgaataatattcttgagctgagaatatttctatagccttactttaagcacacatcttaaatccaggctaaaactcttagactggcattggcaattagctatttcatggatataaactaaggagacttgacgttaccaacctgcttggggagtattttgctgagtctatccaactgttatcaattcgagaacaatactttttaatttgaatcaacctgtttttttaaaaaaggttttgttttaactaaattcatctgttctccccacaaaaagccagtttgtttgtacttacatatctctatgtatacatgtatatatttttgagtctgcaatattcttgtcagaataattttgcttccttgaatatttcaactattcaaaaatttactgggttaaaacaacacacacttactatctcacagtttccaagggtcaggagtctaggcatggcctagctggtcctctgcaaggctgcaatctaaggtcactagggttcagttttcatctggaggcaccactggtgatggatcaactcctgaggtcactcatgataatgagagaattaatttccttgcagccgcaagactgacggtcgcaacttcttggtggctgttacttatatcagaggttacgtatcagaggttacattagctcttagaagccatcctcagttcgctactaccttgccctcgccatagaccctttacaacaagcagcctgcttcttcaaatccagcaagagaggaagagagtgagtttgctagtatgactggattttatatagcataagcataagagtgacagggcatcacttttgccacatcttatttgttagaagcaacttaaagttcctgcccatattcaagatgaggaaaatataaacagttgtgaataccaggaggaaagaatcatgagggttaccctgatatctgtctgccacatcccaaaaagaaaatctatttcaggctttggtatcatttgaaaggtttccagataatcaggtagtcaacattaaataattgtttgaatgacatttaactattgcacaaacaggtgcctctttaaaaaaaaaatacacacacatatacacatacacttttttaaagcagagtccaagtgtgccagtaactgacttgagtataaagcttatttttttaatgttatttatctttcaaaccataacagaaaataattttatttcaaatgatggttatatatttttatcattattaaatataatactatttttctccaaatttatcccacaaattttctcttttttgtgtaattgattgtgtatagtataaaactataggtcactagttttagcaactgattgaatttaaactgattatgtgtttggattttctatataagctaattttaattacattaaatgtttatagcagtttgtaaaaagagatgcaatcgtaacattttattctatattattttaataaacaatctatttttatataacaaaatctataaagatattgacaagaatattaggttatattaaatgtttacaaatggtcttttagattaaataagttgcattgaaataatgtgcttcagtctttcaaattcattttaacaatttgttcagcaaatattttattaagcaagtgtcaagtatgtactaaaagcttacaacacaagagcaaccaagtcacatattatttgaagccctaaatattcagggctatgttagaagagtattaatatgaaataatgaataaggacattaaaagtcagagagtttaattgatatattataggttataaatttagggatcctaaaattgggattggagtccaggtcttctgtatcacagtttactggcctttcactacctcttgtagctcttaagtaataagttgccttcatttgtcagagagggtgatcagtgccctgcaaagttcttttcatgaagcagttatagctttgtgttgatccatagactctctggtttgttccccattgagaccagctaagccatgagtcacaagctgatggttagagttcagcttggaaacatgaaacagaatgaggttaatgacacagatcagaatcaagcctgtgactttgttttcattagtatcatgctctacataaatttgctagccagtcgtagatgtcaaagtagaattcaatctatacattagtttttctcttcctcctttgacctccagccgtgtaatgaaagacttcttcaagaaggatggccgggcatggtggctcacacctgtaatcccagcactttgggagcccgaggcagatggatcacttgagaccaatagttcaagaccagcctggccaaaatgatgaaaccccctctctwctaaaaaaaaaaaaaaaaaaaaaaaaaaaaaattagccgggcatggtggtgcacccctgtggtcccagctacttgggaggctgaggcaggaaaattgcttgaacccaggaggtggaggttgcagtgaggtgagattgcaccattgcactccagcctggatggtagagtgagactctgtctcaaaaagaaaaaaaaaaggaatctatgtagttttatagatttgcaaaaaatactatattcccaatgtatgctgtgactcttaaaagtatttactaaatgttgccaatatctagaaccatctcttaaaaaatatttcaaacatatcagtgttaacaattaatggtgaaacaacaatgtgattaaatggtgttttaagtaggttttaaaaccaaattatatgtacattgcattggcttgtcagactctagttattaaatgcatcgattttaccctgggaacactcttatttccctacagtttaccttttaataagtgcagttggcacatgttttgaccagagttattatatgtcttattgttcactgtatgtctgggacttttttttgttttgcatgaacttggcagcaaattcaaaacttttctcacattaataaagctactggttaaaatatgtcaagggcagagtagctcattcttgtaatacggttgtatatacacacacctttgttttgttgttatagaaaatgctaattagtatttcctgatgacatgtgagcttgttgcatagattattttccacttaccttaggtcttggtgtattaggcaggctgcgaagcacagcttgcaggggagggccaccattgtccttttctccttcaaatattatataaaagttcaggaaaaaaagcattctcatagattatattttgtgactgactacccgtattttggggtttgtgtggtgtgatgagtagagattaaataatggaactaacttggttatagatagttctggggactaggagattaaagacaataacagatgtggggaaaaattacttttgtagaaatattcaagagaaattatttcagagaaataaatgtatgtttcatgtttagttcaatgttattttcaaaggattatgtacaagagaacccccactgtattttttccggagtgatgatgttcctgataatttatgtcaccaaaaagaaatgtgttctaaataaatgaaaattacctttagaaaaatacctgatttactcatacttcctattaagagtaagacacgaatatgagagggaaaagtaatacaatcctgacataatgcaatgccttagtccctagtgaggtaaaatatgtgatacatatatgtttaatggacattattgtgaagaatacaagaacaatgacagttatttatattgcaacttagaaaggatacaaatgaatggttttctttctcaaaacaaactgtaaaactaaggcaaaccattttcctttccaaggtctgctgaagctgacagctgccacaaagcttattcccagtgttctccaatatgtagccacaacaagttgttgagtcctcttaaataactaatgtcagttattaatataaactttagagtactcttaattgtgattgcaccatctctttccttggtttctgggaccatttctattcttcttcctatggactcacctttcttcagtgtccttttctgattccttctaatttgtccaattcaatcctcagactgttccattctgccctagytggtcatccattgactgacaattcacaaatctatttctccagcttcagccacaaaagagagttaatatgtccactctaactcagaatctctatagagaaatgtacaaattatactcaaggtagacaaacacaagtacactatgtttttgtactccacttgaagctttaatagattctctccaacttaatctgtcttaaaacaaactctggatttacaacyttcaaacstgctccttccccagaaaccccacttcactcaatagaagcactataatttgggttgctaagaccaaacatcttcaatttcttttcctttctttccttttacacacatacacacacacacwyacayacacacacacacacacacacacacacacacacacccctatcagtaaattataaccaagccttaactatacttccccttctcctacctacttcttccacgccgggccaagccagttatctttcttaattgttgaaatagcttccaatctgctatatgtatctccacacttgccattctaccgtctgttttcaacatggcagccagagtatgatcttcttaaaataaaactcagaccatgtcacacttctcaaaacctgtcaaaggcttccatctcattctgaatcaaagttaaaacctcttcccccaaacacacacacacacacacacacgcacatgcacacacacacacacacacacacacacatacatcttcctggctttgtcttttctgatctctccctcaacttgctccagccacacaggcctcctagttgtcttgccctgccccacagactttgtcctgacaatcctgtctgcctgtaatgcatttacctagcttccctcaggtctctgctcaaaaatcacctcaacagagaggactttcctgaccacatcttgtaaaattgcatacctccctctcccaggctccttacctttcccaggctccttaaccaccccccatctttgtttttctccacagaacttattatcacctgataaaatatgtatattaatattgttgtctattgtctactttaaggatgacagggattttgtaatatttgtgccatagtctagcacctaggacatgtagtagttattcatatgtattaaataaataagttatatgaaatatatcatttaacagctgatttgcacaagtgggagtcaatatgtcaatttcaacttagaatttctgtagagaaatgtacatattctactcaaggtggcccagactattcttaaaccatatttaagaaggtgaaatagagatatgatttgatggtttttattattatatggttttcagtattggatacagcaskgcacaaattatattaaaactacaattaaaaactacaatttcatgccaaaaaaaccctgattttactctgatcatccttcaaggctgttgttcttgattctagcattgatatttcatgtttatttcattacattttatactattttaaaatattaaatatttaaagcatatataagctattttcacagttgatttgcattaagtggaagttaatatgtcaattctaactcagaatttctaagtagaaatatacatattatgcctgaggtagacaaatacaaatatactatatttactataccatgactatttagtatctttaatcccataaaaattaattacctgacttatttccaccaaagctcttctaattaaagttttggaccacagtgaaagaaaataagctttaatttatatgtattaaattttgtatatcttcctttttctctctccaatggaagtcttatgaatgtgtaatttagacatgtttgtctagctctcacatatatgaaaggtgttactgttagcttttctaaacagaacattgtaacaactgccacacctacaaccccattcagccagaagtgcaactccccaagctttgggaattttctactaaaggacttgaaagagtcaatgtttcatagttaagttgggattaaggaaccatcttgaccacagatttctgaatttttttagtatataataatcattggcaattatcttgtccaataccttccatataaaaataagaaaaaatgaaatattcctcatgcccttggaaaattgctggcttagttttcttttccctgtaatggcttaccatctggtcattcaaactgggccagccacttctcaaggctgccacactagcctattgctccttccatgatgttttccccaatgtttgtatttctggttcctccatgtcattcagttctcagcttgaagaacacttgtcagggaggtcttctctggcacccaatctaaagcagccttcagtcacctactagcatatctcttattttatttttcagaataacatgcctcactatttcctttctgaagtgtttgtttttagatttattatgtgttattgttcatcatggtacattaaatacagagggtagcagccttgattgttttgttcaccacagtatccccaatgagtggaacatttcctggcaattagttggtgctcaataattatgtatttaataaatgcatgatgtaatccttgttacttttcatatttgtattagtgactaaaaaccatgagggggcctaagaatgtacaacccaacaaatacagactttccaccagccacatcatgggccatttaaaaaaacacaaaattaactgatctaattgtcgtaagtcttcagagttatatgcccagttgtttttgacattgccagactactctttgataaacctgtcaatacaattaatttgttgataatatgcatatctcatcaccaagtgcagtcttactttcctgcatctgaaagaagaaagacaagaatgctttctgcttcctcttgacattttccttcccgggaaatattttcctcaagtatttaaggtgagttacattaaaatatwgaaaaattagcttaaatcttttcttatcagaaaaataagctgatcatattcattcaacaaatgatttctgagcacctactatatatcaggctcttctgtcattgggattggtttctaatggaaggagcagataacaaacaaataactagacggcaacattcacgtgttattatatccttaccacagtcctttgatgtaggaattatcattcagactcacactgccagctgcagagttgggatttgaacataaatttctattagtttaaagcctcctccctttgtactttattgtttggaaaaagaatattctatgaaaatttaaataataataacaaaactgtgagtcttatagggctttaaaatcattataatttatacaaaaaataaattatccatttaaacagagaaattattcctatgttttggtcatagaaactaagtgcattatacattaccataatacattactttaaacatctaaaaaatgaattatagtataaattagacctcatcaaaagatcattcagttacatagtttatcagttattgtccaaagtgttctcagtaagacagctctaattgctttaaagtgtttaatatggcagacattagattctggtaggtggataagccaatctttaagtcaaccgatgctcctgtaactgcccagtgggttcattttgcctcctgcccagacagagccaatttatcaaaacaaacgaattgcaatagaaaaagtttaattcacgcagagcctgctgaacaggagaccagagtcttattattactcaaatcagtctctctgaaaattcagagactggggttttttaaggataatttggtagataggatgccagggagtgctgattggttcggtgggagatgaaatcatagggagttgaagctgtccacttgagctgagttggttcctgggtgagggacacaagaccagatgagccagtttatcaatctgggtggtgccagctgatccttcgagttcagggtccaaaaaatatctcaagcaccaatcttaggttttacaatagtgatgttatccctaggagcaactggggatttttagaatcttgtgacctctagatgcatgattcctaaatcgcaatttctaatcttgtggcaaatttgttagtcctacaacagccagtctggtccccaggcaagaaaagagtttgttttgggaaagggctattatcatctttgtttcaaagttaaactataaactaaattcttcccaaagttagtttggcctatgcccaggaatgaataaggacagcttggaggttaaaagcaagatggaatctgttaggtcatatctctttctctgtcataattttttcactgttataacttttacaaagacagttttactcctatgataatccttcagttagttcactgtctagttcctgggagtctgttttgtggatcctaaccctaccccaaggattctactgcattgtaaattctgactttacatttaagacatggagttctttgggggcagggagataaatatcctattttaactatcaagggttaaagtgctttcaaggatctagtgtctggtggtgataccagagtcatacaattcaaattacaagcatctgtttgttgtgttgagagcagggactgataaatgaggcactttttgattgtgcaactgggtataaaacagtcaaaatgatgcttataacttcaagcttttctcccacttgaatcagccaacaagattttcatacaacatttagaccagagtagctgatgcttctgtttcttgcattttgtctggtttgggatcaattttgtagtcatggatgtagttatagctctttggtatgtgaacatgagagaggtgtaagctcataaaataagaaaatctgtttttgttaaagtagacgatgtgcaattcagaaacaatgaaccatatcaactaaataatgggttaaatcagtagagactttgtcaatcttgtattgatttaatcatttcaaaattatttattcattgtctataggtatgctaggagaatagttgaatacaaaaaatgttcttacactcaggaacttcacaatcaggtgcaaaaatgagacaggcatactcacattaaaaattaaatgacaattcaagaggcggcacaggcagtctaggataaactgccatatgaataatagcaacaataaagtagatgagctcccaaaaaggaaagatcgaggaaggcagcatggaaaaatttgacattgccttgtgtttggagttgaacgagttggaagtgaataagtagaggtttttccacgttgcagagaagtacgatggtggggggtatatatggggcattcaaaatgcatgaaactaggaattcgtttgtcatctttaggaaatttcagaagtagtttctgaccattttatgtgggtcctttattttcaagtttagacattgggattttatcctgagaataatggggaaccattgaaggttttctacaggggacaaggatagcatgttggaatgactaaccagatagaaatatgcacaatttcttgaaaatagggagaacgagaaaggaagaaagcagaacagtggttcttgactttaatgtgccacctaagggcmaggtgcagtgggtcacaccsgtaatcccagcactttgggaggccgaggtgggtggattgcttgagtccaggtgtttgagacaaggctgagcaacatggtaaaactccatgtctacaaaaaaatacaaaagtggtggtgtgtgcctgtaatcccgctgctcgggatgctgaagtgggaggatcgattgaggccacaacattgaagctgcagtgagccatgattgcgccagggcactccagcctgggtaacagagcaagacccctttgtctcaaaagaaaaaaaaaatccacctaaggagcttgttaaaattgccgattcctgaaccttactccagagattctggttcagcaagtctggagaggacgcataatctccctgttaagggttagattctaaataagtggtcttcaggccacattttgaataatactaaattagaaggctgtcacaataatctaggagtgaaatggtgaaggtttgtattataattttggaagcagggatgaaaagaaagtgatggttggtagagatatagtgaaggaagaattgataagacctagaaatgtttgggtataagaaatcaaagggaagaaatagttttaaatgatattaatgtatttatcatatttgatatttttgttaatgtaactggatttgcaagtcacttaacttactttaaaaagccagtgcaaatwaaaataatgtacaaattgtaaaccaaggttgaaaatataagatcaaatgatgggtatgggaatatctgtaaataggaaagaaattcataaaaaattaagctaccactttgtgttatttccaagtgtattctaataattagttttccccatcatggatttaattaattcttagtcaagatttctggatttctttaatcattaccttttgaaagtagatgtagaattctcaattatctaaatcttccacatttagctgagagaccaactctagggaatatattagagtattttcatagttccatcagactatgaaccccaattcttagttaaggcactatagctatgggaattatagtccatagtgaataaaatatacaatcatggaccttattttgaatagcttccagaacaaacatatgcgaacatcttgaggaggttattatggctaggttctagcttgcatcactaagtcatcaagaatgggagacaaaaggtataaggaaaagttttcagtagaaattataataattgtcagaggaattatttcagtctcaggttgatgcaaatttgggtacagtggatgctgcttccacttgttttcggaagccgtaaccaataatcaaaagcaagcaacttttccaaaagtaattccatcttgttttttaaaaaaaagtttgagtttatttaatatcttcatttagacatgtgaacaaattgtttgcctttttcattaatgacatctgagtacttgtgtagattgccttcatagttcatttgaggcataatgcctcaaattaggaactggaaatgtttctttttaaacatgaatattgcctaaaattgctgaaattaccaagtctttaatttcatcaacagaagaaaataggcaaagaaattcaggcaaattgaagagttaaaacgttatgtataggtcaggttcagttcagtgcaaataactgtaatattcctttatgttttaaagggatgtttggtttgagagggaatgctttcaccttctgaaagggaagagggaggtcaaatagtgacaaaagaatgaggacttgggggaagtttcagctaagaggacaagcaaaagaaggctgagaacaaacagcaatttgtggtgggcatgtttgggagctgtaaagagaatagctcttgctttggagtaaacttcctcagtcagaactaggtccttgaattcagaccagctctcatctccttggtccactctagggctgatggaggctgctgaaatcatcttttgctacattaatactcatttttcgctcaaagatgacaaggagtatttaaacgcagagagaatgttatttataaatgatgatttgttcgtgatagaacttgccacatagtattttctcttttttaacttttattttaggttcaggggtacatgtgcaggtttgttatataggtaagctagtgtgatggaggtttgttgtaacaggttattttatttcatcacccaggtactacgcctagtacccgataattattttttcttttcctccccctcctcccatcttccaccatcaagtagatagaccctagtgtctattgtttctttctttgtgtccacgagttctcttaatttagctcccacttataaatgagaacatttactaaatggatctttataaaaacagtttgccgaccactaatgaataagaaaatattagaataaaaaagctcaatgtcactgatcattagagaaatgcaaatcaaaaccacaatgagataccatcttactccagtcagaatggctgtgattaaaaagtcaaaaaaataacagctgctggcaagatttaggagaaaagggaccagtattcggttttctgttcctgcgttagtttgctaaggataatgtcctccaactccatccgtgttcccgccagtgacattatctcattctttttatggctgtgtagtattctgtggagtatatgtaccacattttctttaccaaatctgtcattgacaggcatttaggttaattccatctctttgctattgtgaacagtgctgcaaggaacattcacgtgcatgtgtttttatggtagaacaatttatattcctttgggtatatacccagttgtgggtttgctaggttgaatggtagttctgtttttagctctttgagaaaccatcacactgcttcctacaatggttgaactaatttacactcccatcaacagtgtataaatggtcccttttctcctccattctgactggaataagatggtatctcattgtgattttgatttgcatttctctaatgatcagtgatattgagcttttttattctaatattttcttattcattagtggtcagcaaactgtttttataaagattcgtttagtaaatattttagactttgtgagatatacagtctctgtcatactcaactctgccactgaagtatgagagcaatcattgacatttactcatgtaattacatgggtttggctatgttccaataaaactttatttacaaaaacagatagcgagctgaatttgtctaatagccacagtttgcctgaccctgtttcattgcagtatgtgctatttctattgtgaatgaaaaggctagcttagaaggctaactactttttctggcttaggaagctaactactttctctagcatagtttcctagagaaataggttctcgattaaaaatagataggaacctgacccacactgtatctggcaaattctttaactaaagaaatgtaaaacgctttggaggtacctaaatagtggctaaaaattgagttccagtgttttctaattatgagatgaggacacattttcctcatctgtaaattaggaataacaataccttcttcataaaaaggccatggctatcaaatgccatcgcataagtgaagtgcccactgcagcagcatctgacatagtaggccctccagtaaacatctgttttctcccttctccattgccaggaaacacatatggaatagaaataaaagtagaaacaaaggagagaagaaggcagaactagtttcagttttaaaatacagaagctctttatctcactaaaatattcattgccggcttaaaggcaaagccctattactagttcaacacagttcataattttcaaaagcactacccctgtcatggtactgtgggagttcttggttttttactcccctaatttcctaaattatatgtataacatcatatatggaatataataatgtatatatgcgtgtatacttaggtatacatgcattatttatgtaacagatattgtgctgagcattttacatctattatctcatataatctttacagtaacattgcaaagttgattctgttattttcatcgatgaaaaaactgacagagaggttaatgtaacccatctgtggttacacatctagaaagtcttggagctgaaacggaaactcagggcgttctggctgtaatgcccattctcttaataaccatgataaatgacatacttttaagaatgaataatatttaactgtgatgagactactgatttggtttagattcatcatttctaagttacttgaccaacatcaaagaagaactgggtcaattagtccaatctgtggtttataattggccaattagtccacatctttgaatctgcacagggaccacttgcacataaatctagatctacatttgccacgctccacaaagcattctgaacaattcactgtgttcaaaaatgagatttctattatttatgcatgaagaaaatatgctgttttccatgcactgagccagggggaaaactactcagccttggtaatattagaccatggatcttccatttattttaaatgatagtgtcatgctgaggaaaataatggttcatatccttcttctccttcctccaaatactatgtcaaaactactttgattaaaataaataaaatcttgtatcactgtgccaactctgtaagaagacagagcaagcaagcaaacacattaaaaactaaggtgttggagagtctgccgtgacttgtgaattctgtatattttttcctttcctgaagttcttattttcttttcttttacttaccaagttacttggaaatttaacaatttaataaaaataaacagcatcttttcccaatatttaaaaaaatgtattattcattaaaaattttgcattcacaaaaaagtgaataattgggctccaatctgagttagtttatgagtgttccccaggtacctatcctctctcttttggagagaacatgtattccttgaggacagattaagaaactagtcttcccttaatgctgggagcctctttgaagtcttatttacttcagatcttaagggagaattgtggtacgctgaaaagtatcacatttgttatcacttgaggaaacaccatttgatctaatgagctagactttttcatctttcaattcatgacagctatagctacattagaaattgcattttggaggtcttggataattatctaaaaatattcacaaaccccttggaggctaatgaatttaaacttggatggctaatcctaaaatggctttattccagcaaagtgggagagaaactccccttcttctgtttatttaaggtttctagtttggggtcctggttctagtttggagtcctggagttcctttcaatgtgtttccataatagcctgattcagaggagtcggggagaaagaaagaaacaaaaagaaaatgccttgtttattttatttacatatatacatacatatctatacatatgtaaaatgcacatggtaaagcatagtattttgcacaaaatcttaagtaaagacagacttgggtttagatttataataggatttagtaatactaataccaataacagcagcagcaaattcttgagtgcatgaaatggattactttatgtaatttctgcaaagtcctatcatgtatattttgtcactagtttattttacagatgaggaaactaaggctcagcaaagctgtaaaacttggccaaaaagtcatgcaatttttgaggattctgatttgctctgtctggtgcttatacccatcttcttaaatagaacaatcatgaggaaattgacaatgtccacagacataagacacgcttgcagagaactaggtattgggacactgcagagaggcaggcagggaacactggcctgaagtatgagctttgaaactggcagtcttcattgtaatcctggctttgcccttgctgtctgtgtgtccttggatgagttaccatcttctgtgtgcttcagtttctttatctgtacaatcgggatagtaataaactaatttttgaaaaccagctaaaataatgcctggttcatagtaaacccaataagtagtagttgtcaatttattaggttggtgcaaaagtaattgcagttttttttctattactttcaatcacaaaaatcgcaattacctttacaacaagctaataggtatcctgcctgctctgtcttatccctttcaccctttagagcagctaaacattagacgagtgcctcatccagagatttattgcaatattttatacatcagaacagtttgaagaacctgagataatattgagaagatagagaatttttctctgtcactccccatcttctattttaaactagtaattctcctctcttgcctgcaaaccccgcttcctaatccttaggcaactgtcctgagttcttgttagttattactaattcctgctgtgatgttcgttgatagctacaatgttagatgataaggaatattatattttaaagtcagatatttgagaaataaaattgcattctcactccaagaaaagtttctgcatatccaaaggatgtgggggatagatatttaggaatatatgtgtgccaggattgggcaactcgcagccaaagaatggaacaggtttaccttggatttgagagctacacacaccacttcacaaaaatttttatcttaatttggtattaactttatttaactataaaactttaaaactaaactttgagaggaggatgaattttgttttaaagatgtttgtagttatttttagctcagagttctatttaggttccccaaattttgtgctacaacagttttaaaagtctgcccagttatttaatctggggagattacaaatacagtgttgacgactggcctgcagctctctcttctgaaatgagatattcaactccacatggcttactgcctcttcctatcccacttagtttccatctcttctgctggtgatgatgtgagttccctaccctgtggggttacaattgcccttatggtttttcttatacaatattcagcattataacatatgtaggttatagagcatataatatatgaactgcaatattatcaatatgttgtatctacctgtgggctccttccttctctcagttaccatattttccttcaccactcactgggtaacaaccatctgaaatttcatgaattgcataacctttccatttttaatacttttaaaaaatcatatatgtatgtatcctctaaaatcttgctatgtaagtatggtccacagatctatgcatgaacattgcctgggagcttattagaaatactgaatttcagcattgccccagacctactgaaccaaaataagtattttaacaagaattgctgttgatttacaggcacattagtttaagaagcactacaccaaaatatattattttgtcttcctaggggttgttttgtttgcttgttttcttatttgtttcttgtttttgagtgttataagaatgacattctgtttgttgtcttctgctacttgctttgtttgctcaacagggcattttaagattcatccaggttgctttctgtagttgttcatggcttcctgatgtaacatttgtgctaatagtccttcctgctaaacacttagtttgtttctagcttgtgttatagtgtataatcctgctatgaacagtctggtgcatgtctccgtgtgtgtgtgtgtgtgtgtgtgtgtgtgtgtgtgtgtgtgtgtgtgtgtgtgtgtgtgtttgcatgtaagacattttctgtgctgtgtacccaggagtagaattatgaattgtagtgtatgtgaatgtttacctttaccagataatggtaaattgttttaccaccagcagtatatgagttttcattgatctacatcttttcaaatacatggtgtcatcaggctttttactttttgctgacctagtggacataaaatgtcctctcactgtggtctttatttgcatctccctgataactaatgagattggtcaattttttcatctatttaattaccattctgttttccttttctgtgacgtgccttttcatgtattttgactatttttccatttttctctcattgattcataggagtacttattttgaaatagtcctttgagagttacatgggttgctatgttttcttccaatttatgacttatcctctcactttcttgatcactcttgaatagaagttccaaatgttagtatagtttatcagtctttcgctgtaactgcttttgtatcttttaaaaaaatccttccttgcatgaatactataatactattctaataatttcagtggatgggtggtttaatacataattagagctctaggatgatattaactgaaatattaaaccagtcttcaactggtattcttaaataactcatcaattggcattttactttcaaaaggcctatgtttaatttctcccatttgtcatccaggcaagatcacaagttttggacttagcttgacgaggctcaaatccaggctttgaaacagcaagtatctgaccttagttaagtaattgtccccataagcttcagtttcctcatatgtaaaatagttgctgctacaattcttctattttaagaaatccgttaattacaatagttgagtcaatttaatgggagctttttaaaatgagaactattagtttaaatttacattttcttaagtgatttaaaaatgcatacattttgccttaccaatgcctacctaccacattacttttcatcatctcaaactataagattaaatcttttctacattaagaatctaaagatctttatacagttttagcctttggtagttgggcctaatttcaaagtgacaagctctttcatgatctcttttacatttttgagatcaagagtgacatttcaaggcatattgattcatttttataaaaaatataattatcaaccacaaaaagttaaacatctctwaaaagttagctaagagcttgtgacagatggacatttagcaactgagtaatcattcttcaggtctcacaaatctgtcactttgaaagttctatgacatcttctgagggatttggtaatatctactcattttaactgtattgctgctgtgtgactggccatgattttatagacatttcaatgctaaagcaatatgcagcttccaatatcattcttatgaatatcttgttgcttttcaataagatatggaagtgcagtttttctcccaggaagaaatattttttcacttatagtaaatctttgtctcctacccatgttttaattttcttcctatatacaaaataacttagctcttcaatgaggtattaataattatagtatgaacttttgaagacattttaagtaaatagtgtatatatatatatgtgtgtgtgtgtgtgtgtgtgtgtgtgtatatatatatattttttttttttgatatggagtcttgctctattgcctgggttagagtgcagtggtgtgatcatggctcactgcaacattcacctcccgggttcaagcaattttcctgcctcaggctccagagaggctggggttacagttgtgcattaccacacctggctagtttttgtatttttagtagagacagggtttcaccatgttggccaggctggtcttgaactcctgacatcaagtgatccgcccaccttggcctacaaagtgctgggattacaggcatgagccactgcacccagccaaatagtcttaatttagttaagtgcaaagttcatcaatctgtagctatatgaatgcaagtcagaaatccaaagtccttaccatgaccagcatggacttccttgatctgtcatttccaaacagctttcacctgacttcatcccaggccactggttgatttactattcctcagccataacaagctggctgccatgtctttgcacttgattttcccacagcctggagtgctggcttactcccttgcttccttcaggccactctaccattactcttttggataagcctaacttgccagccaatgcaaaatagcactcccaaacatcacactccaacttcttaatttgcttcagtttgcttcataacactgagctcctgtatctgatattattatttatatttctctaattaaaagaaatggaataaacacttaagcatctatatatatatatttaccacttaagcatatatatatatatatttaccacttaagcatgcatatgtatatataaatacatatatatatatgtgcttaggtgtttattctgtcttttttaattagaagaggagggccagaacttttctttattgacttttttatctccagaacttagggttggcacatattaagtgctcaataaatattggttaaatggctgaattaatgttgagacaatcaggtgaacaggtgttttctatgtagagttaagagtccaacgggctattctcaacattggcagaggactagcacagttctttagtccccactgaaagactcatcctgatcattataatgttaaaatgtgatgaaaaaagcatactgttgcaagaattaaataaaataatgtatggaaaatgtttgccagaatcagaatatcaaatgttaattgttcaataaatgcaataaaattaattccatctgaatcaatccttaccccttcctttcctgtaacagtggaaatgttggcttttttctagtttgggcaaatgcttccatctgtgccctgcagttcaacgcccctcaaccccatcttctcagggacaacatattgttattttccttccttctgtcatatctgttatttctccctctctttgcatcctactcatcaactttaaaacctgctccactcagaagggggtccttttgataatgtatacaaagtcactacattgcctttaggggacactgaataagaagtaattctttatcaggcttctgcttattgctcagctgtccttgcaggtttatagacttatttgccattttctgaatgtccaatgccccacaatatctctcatctctaagttattgtctgcgccagtctctgcccaaaatgcctttactccttcatctccccaagacgtacacacattcatggtcacacatatgtattcacacatactgaaaatagctaatttcaatgtgtacttgaggtcttggcctcagattagatgccactctccctttggtgaggactcactgagctgtaagggttgaatgttcttccagcagacactacatatccgcatcagtatatctcttccccccatcttcccaaattatagttgcttatttatttatttcctctgcaagacacaaaactccttgaggatagtaattttttgtgcatgtttgtcaatgcagtatcacagtcgtcctgagaattagcacacagtagataagcaatatttttaccttgagctgacaagtggaatggtatcattagaaagttacaaaattgattttgtgatactgagcctccaactagttggaaattagtgtgctgctaaatttgcattagtgtgctagtcaaagacaaggatattcaagtacagcatttcttagtttcatattaattgcatatttctgtttatttcatattagacaaaaattactgaaaagcagcctaatatactgcgttggaaacaatatgatagagactttaatactagtacttgtactgrcaatactgacaatattatcttgtatatgtataggtttttacaaatttaaaagcctttcatatatctcaaggaaatatcctaagaacctgtttctactcaacattaaagacctaagtgaaatctgagactttcaatgcctttggatatgtaattagacaggagtttagccttttgtaacacatatgatgatgaaaatttccgattttaagctgactgttgggcatcaagatgaccatctttacaaatgaagtagcactcatgcgctcaagtatacatagaatgtatgcaaagtgaaagtctcctttaaatcttcctcccattgacttgagcaacgagaacacgtggacacagggaggggaacattacacactggggcctgtcggggggtgggakgctggaggagggatagcattaggagaaatacctaatgtaaatgacaagttaatgggtgcagcaaaccaacatggtacatgtatacctatgtaacaaacctgcacattgagcacatggaccccataacttaaagtataataaaaaaagtaaaaaaaaaaatcctcctcccattgccaagatagaaatggacccttagttactgccacttgccatctcactctgtgttctggatagaaatggtgcttgctctctgctagctgttaattgacatcacttctgccagaactctccatcattattgacaagaatgttctcccttgttaattgcccagcagcacattgagtgattgattgtatcttttggacagatttgaaatgcatttgcagaaaagggtgggggtggtaatgacataatgcatggtaatgacaccaactaactgcttatttaagtttgttcaggaaaaagatactgatcatttacctgatttttactttttatatagatgtgctaatggtaagtagtgatagctttccaggatgtcccacattaacccaatgcttcacaaaaatctctctcagactgtgcccataaaactccaaaatctatggtcaactagtgggaaaaagaatggataatttatttaacatataagcagggaaaaccaatgggtagatggaatattttacatttttgttgttttaattaaaagtaggaaatacctagattaatgagaagagtttttaaatggaaggctgggagtgctcaatattcagcagtataagattttcttttagcatagaggcaactagagtaatacataaagtgcatattttcatgagaactttgcttataagctggacttccctagaagtatttgagacacaagggcgagtcaactaatagtatctacagtgtttttgcaaccatttaatgagagagtaagtctggatcagtagttgctgatgtatgaaatcacatgaagagttttttaaaatgccgatgccttgatcctcccctagaaatactgattttatttgtctaggcagggtagtgatgatcaaactttacactgaagcagcatcttctcacaaatttggtaaaagtataaagcctcaagccctatcctgcttcatggagcctgggtctttgtgtgctggattagctctcctggtgattctgataacatcaaagtttggaatcactgctctaggttcaacatcagacattttttttcaagctcccccaggtgatattccctaggtacagccaagactgggaactgctgattaacatgatatttaggatacttcccagcctggcaggaataataaaaattgctacctttattaaacattcattgcatataaggcattgtgctaagtattatttcattaaataattgcaaaattctgtgaagtaggtaatattagtactactttgcatatgggagacagggatggtaaataatttagctaaagtaacatgggtaggaagtggtagattggaactcaagctgtaacctcaaagatcacacaagaaactattactatcaataacattttggaattataagttaaattaaaaactctacaagttggaaacatattaaatgattttcttacattttaaaatgttcctgacttgcaattacatagtaaaaacaaaacaaagaatttttaaaaatcagtgggaaatatataaaagataaagttttcatgagtaaaaaggaaggagcaaattggtggtgaaaatcaggttggatttgaattattccaatttaatctggaaaaaaattataagtcacttgtactgttagtrtatgagaaattagaataagagtttcggatagaggtattttgccacagttatattgaggcgaaaggtggcaagcatttcaggggaaagaagaaatttgtgtacttctttaaaatggttttggatgttaataatgcaatgaattaaaagaaaaaggcagtctatactgcagaacacttccatttctctccttttgtgtttgggaaaatactggcttagtgccctcctaggcatggtaaatactttgaccactgccaccagtcacacttgtgtctgcaaaaggggcaaaaagagtgcctttgtaaagtatggtttaatcctacacagtggagagtggtgcttaggagattgccttgtttctcttaagacacaacctttctcagattttgtgtatagtccacatatgagcagagggctcatattaaactgatggaggaaaggtatatttccaaccataaataaataaatagcatgaagagatgatgaaggccttctcctgccacttgcacatttcgtggactgttcttgctgataaacaaagtgagcacttattttcattggcattattttcccagtggcatctagactgtgtggagagtgttgaattttcagcagtctagagagtttgagacatggttcctgattctggtactctagcatccattacatgatatgcttgaaatgtacatatgaaaatatgttaagactgagtgtgtgggaagaatagaataattacacagccaacaagttgttgtgagtcctaaatatattatcgttcaaataatggatggtacgtggtaacttccacaaagaaaaattctagaattattttaacagtaagcaaattgcatttcatctttaagtaatatggtcaaataaaaaaggtacagggaaaaaagtgtctatatattgccctgaaatcctcttggcttctttaaaaaacatttgacactgcaggaaaatgctaattaaaggaagacaaaagttgaatttggattctagtgcctcataggactctaatttctgtgaatattgatacaacatgtttttaaaacactttagtaatagagctgtgttctgctggaagtggcagaaaggcaaattgcaggcaggcactgaagatagagactaccgaagataatcagaggtttgtaattgaaaaggtgccttaaccttaactctggccagcgggctcagccatggctctgcaactaaggacgactcgccttgatttccagcgaggaccactcccgaggccaagttggaggaagatcttcaagaggaaacattgggcattctccctgctgtgggaaagagccacacaatgttttatcctatgtcagggaaagagactgaattaatcttactattggatcttcacccagatccaatttttcagcgacgcgcatagacaatattccaggcaactttgcctggtcacattccttatctttggaagcaccagcatggggctcatcgtcaacaagctctgagaaccagccaggaatcgccaaactccatttctctaagagcactgaggcaagcggaggtgaagaggaaggctccggggcagtggggagcagtgtggaggagggaggcgcgggcacggcgaggggaaggatcaagaggacaggtctgactcctgactggctggagtggttttggtgaaagtcacagctcgggcgtgccagcctggagctgtccaacttttcagcagctccgggatcagggttccggtgccctggaggcggctaccactgccgccgccgccgttgctgctgcttctgcagcccgagttgctgacaatccctgctctcgccgccggcgcccaaaggaagggaagaagaaagggaggaagaaggaccaacctctggcgaaaccgggcaccgcgcaccctagtcttggtgacttggggagcccgggagcgtgtctctgccatagcctcggtggaaggagccctgccgcgttctgtgacccctcccgctggcagggccccctctcggtagccctgaggctctggcgccttcaagtgagaagctaagcaccagcctctgctgggctgcagaagcggcggcggcggcagcagcagcagcagcatcaggaaggcgctcgggccagcgcggtgaacccgggctgggcagcaggtcgcggagccgcgagccaggatggaggcagagggcagcagcgcgccggcccgggcgggcagcggagagggcagcgacagcgccggcggggccacgctcaaagcccccaagcatctctggaggcacgagcagcaccaccagtacccgctccggcagccccagttccgcctcctgcatccccatcaccacctgcccccgccgccgccaccctcgccccagccccagccccagtgtccgctacagccgccgccgccgccccccctgccgccgcccccgccgccgcccggggctgcccgcggccgctacgcctcgagcggggccaccggccgcgtccggcatcgcggctactcggacaccgagcgctacctgtactgtcgcgccatggaccgcacctcctacgcggtggagaccggccaccggcccggcctgaagaaatccaggatgtcctggccctcctcgttccagggactcaggcggtgagtggagagcgccccctcccccattcaggcaaagggtcacctccccttttctcaaatactccatctaagtcggcttatcaccaccaattctagacccagggtaaaatgctagtctggaaattgggggaggacaaacaggggtgtgcctatcctttattgagagtatgctattcaggtgtgtgtaagagaccccccaaaagtactgcataaatgttaactggggccgtgtgtgtgtgtgtgtgtgtgtgtgtgtgtgtgtgtggtgcgcgcgcttcccagttatctgtgccacgcaccagccctctccccacccacttccataccaccctggctagtgagactaaacaggcaaaatcagtttgctctgggtggagaagaagagaaggtgaaggttttgcgggatttgaccagcgaaagcacccagcatctgtccactcaccctattgggaagagggtcggtggggctgctctgactggggaggaggggggagtgagaaagcctggtcccaggattgcagctaaaagcctaagaacaactcgcatttctcttcgtcaggtggagaagtaaattgaatagcaaaaggggagaacacgtgggtgacttggagagtttggagcaaaatgttcagcaatccttgagagagacaagggggtgagggagggagaaggagcgaggacgctgtgggagttacactgtgtcggtgtgtgcgagcttgtgtgtagggagaccgtgtgtgtatcagtcgtccctgcaaaatcccaggaagaaagcgccttgttttagcagcaggcaagacgtagagatttgattatagtgatttcgccttaacgtaagtgctccggaagacagggcagggaagccgcctatcaaccgggagttttagtagaagttgaccgctgcttctccaaggaaatgagtaaaggaccaattacagccattctgaggagtcagctccagattcttaactcaggcgtggaggtggatgtggggcccacgtttggtccctttcctgataacccagggacagctcctttcttccctgtcccaggccttccacgccgtgaatcccctcccccacacaggcacaggaaaaagatttcaggagctgctgatccttggcacatctaatagtaaagtagaggggtcgtcatctaaccttagatgtggacaggcatcgatgtactgcacctccaagccacaagtctgaacaatgggcagttataaattgtaaatcaggtctgggtgtggaaacaggaaaatctagggctgggattgtttgtccaactctgattgacagtaggttggactgatcagaaaatcataatggtgttcaaatgtgtgtttgagttttgtgtgtgtgtgtgtgtgtgtgtgtgtgagcatgtctctctgttgtatacactatgtacaagggaatccagccaaactatcataaccctgatgtgtacacatcatttcagcttgcatatatgctcttagccctttgcctggctcacacccttaggtaccttgttggagatgttcttgtacctgttggatgggaagaataagaattgtaattaataacctcaattcagatcaaagactgcagactttcataaattaatataaaagtttcatttttcagccaagactgctaagaccctttgtttgaagaggtggatgtccttctctctcccctttggttgagcacgacactatgtaggaccccaatgatagaatgaaggcaagcctgatactttgtatatttgacctattaatagaaaaataccgtgtgatgatgagcccttaataaacattaaataagaacaagagttctagcttgatctgtgggctgattgattttgtagagtttcttaattgacttcattttttaataaaatagaatatgcctgagagagtggaagaaagaaaaataagctaattggaatagaggtattgcatcattgatttgaatttattttttgctatgctttctacattgattaattgttctatttgaaatttttagttgaatggttcacaggcaaactaagatgtataatatttatatgtagctgccactgtggctcacctgatatatcattgtcattctatttaaggatccttagacttaaaattctttacaatacttgcatattccccacatgctcacacattgcatgtcatgtttttccttaatagagttgcttttgcaaataaatacatctttaaggaggacatggatattagtttcattctttaaagagaacagcaacaatacttttttattttaaagagaacagcaacaatgcttttaaattatcaaagaaattttacatttatcaacttatttgaatcctacaacaacactgagatgagatggtattatctctatttgatagacaagaatgctgagccccagaagatgcgagcaatttgttcagtatcacatagactgtgagtgctagagctaagactgaaacccaagtctcctgcctcatcaaaggtggtgagcccaccttaaataaatgtgtgcagaacctgggcctgttgacagcatcaagaaatacatgaaaccaacgtgaagtttatatcgactgatactacaggacataaagcctgaatgaactaaaaatgagatatggtttaaatccatttttaacaaaatgacatatatcacaagcttctagaagtaattagagattttaactttagaaactctgggcagtataaactggtgttaatgatcacaacagaggcaaatcagtgtatttgttgactttgtaaaatgcatataaatacttatgaaagagtgttcagataaattaaagctagtgagaacatctaacgtctttttcaataattttctaaaagcaaacaagaaaaggtgtgtgtgtgtgtgtgtgtgtgtgtgtgtgtgtacgtgcgcaccaccatcttaccatcatccaaatggggggtttaaatagtctatcaagttaatgtctctgaaaaagcctcatgggtggatggatgaatgattccctatggattatcaagaaaggtatatcttttataaagctatttctagcatgcactgtagcatttccagatattatcttggctgaaattttgagaatttgtaacagtttgtgaagcaatgggaaagaggaatcttgtttaatgaaaaaatgtatataagcagtaaggagacaacccttagatattttgtggtcaattcttttaagtccatgggaaatttggatatgttaaataaattttttatataaagtgtgtctgtcaaacaaggtagattcatgtcttaatctcaacatgcaagaaatttcaaacaataaaattaccagagaaatgagtctctaagttaccaagagaacaaaatgaaatatgaaaaatgtttaaaacactctttaaaaatgtacatatcagattaatcatttcaaccaatagtcttcaaaatgtgacaactatttaactgaactgataaataattttattgtttctttgactttacacaacaaaatattattttcaataatataatacactaaggttgaaaatacaagcagcatggatgattccttgatattataaaatattctggattatagtgatacaaatatccagaaggggacatttgatttagatactttgtttgattcatttatttttatctatttatatttattgtttttttagagactgggtctcgctctgtcacccaggttggagtacagtggcacaatcatagctcactgtagccttgaacacctgtgctcaagtgatcctcctgcctcagactcccaaagtgctgggattactgtcatgaaccaccatgcctgactcaatttaggtagaaggaaaagagctaaaacctataatcacacaaaatataaattctgcgcatattatatttacttgacattagcttttttttttttttttttttttagacagagtctcgctctgtcacccaggctggagtgtgcagtggcacaatcttggctcactgcaaactccacctcccaggttcaagggattctcctgccttggcctcccaagtagctgggactacgggcacgagccgccacgcctgactaattttttgtatttttagtagagatggagcttcaccatgttggccaagctggtctcaaactcctggcctcaagttatccacccgcctcggcctcccaaagtgctgggatacagacgtaagccaccgtgcttggcaacattagttttttaaatatgttaacatcatatattaaataaagaaaacatattgtaatatttaaataataaaagaaattaggttttcatttttctatgctaggttataaaagctatttctttattgttttattgatttttcaggttattagtgtaattttttcttcattaaaggatgtaacggtaatctaggttcatgatgtaaaatttagatttcacattaccaaaataattaattgaaaaattggccgttcagattgtctacatcagtgaatttgaatttaggaaacagtatctttaaaaaaaagcatattggaaaactgacataaggttgacatctttaaattttaatatgtaaggacactaaggatatttaaatagcaaaaaatgcaaggaaaatgtatattttttacatttcctacatattgtcaacacagtaacacagtattagactttttaattttttcaaaattagtttgaaccttttattcttgatttgccttcaatagaatattgtcttggtaacttcatttaatactttatcagctagtgtgttctaagcctttgattaatcagaaaaacataatgaatccatcacctttttacattttgattctaaaatgatgtaccttctgtgtttcatggaaatgggaggtggtgggcagaggaggtagaagggaaaggataggaacaaatccccaagcagggaatgttcctaagtccttgtcttattctaattggatcatctgggttcagttgcccacatgtggagcagtagcatgaaaataggtaattgaccacatcaacaagacatatttctctaagattatggaatgtcgagaagagaagggactgaggcttaaactaacctagtccaccactgtccatcttttacatttgaagaaacatgtgtcatgaggggttaaattacttaacacaactagtttactgcccaaactataactacaaactatatcctccatatctgctgacaattactttacattttacacattgtggccatcttttaaccatcagtagccccaacttccaggttatagccttgaaccaaaagtttggaaattacatttaaaaaacatttgtgaataagtggaatattcaaatattggcacaagagagatgacttcagaaaacaaacattctttcactttcaatttggatacatttacacacacacacacacacaaacacacacacacacacactgatggcttgctcactgatttctatctctaaactttaatgtgggtttggaggcatgtcttgggaagagttcttaaagatcaaatagaataataatctaaaaagacttagttctgtttatgattttgctaattatttaaatgtctgaagtctatcatggacaaacttatgtccctctcacagcttattatccatctacaggtttaaaaatatgcaatatgtgagtctataacttgaatgctgctagtactggctcataacagcaacgttgctaagggattacaccaaatagcactgtattatatttcaaaagatgtggctatttttatcctgaggaacattttatctacgtttaaaaataagaaaactgatttttcccgaagaataagccactttaccttattgtttaaaacttatcagctaaattggttggaccctatattcacacataccaccattgccccaaacctcaccataccactttggagattgagaactctataaaatttgctttgtcatctaaatgagcatttataattcttgctccgtctcaacgtggggcatcacatccatccagttgtctctggtctgtggcattcttagactcttcctctcccctaactttggatctcaaagaccaccaagatcttttgaatcgtcctcagaaataactcttgtgttttttccttgccacttccctagttccagcacttatcctctattcactaaactatcgcaatagcctctaagtgatctctagctccaacctctcctcattcctgttgttcctttttttttttcaccccaggctaccaatttcaccaccatcttctaaatcttaaggtaatttctctttgccttcaagataaagtctaaatttcttagtttgactcttcagaatgttggcccagtcggtctttcttgcagaaagtctaacttttgtccccttttgtaaaccccatgaaataatcacacttaaattctggccgtggtctgagttctctgtgccttttcacacctctctttcttgctgaggctgcttcttccttctagattgctttccctatgctctgcaacaccccttccttacctgttcagaaaactcatgaatatcttttcaaactcagttcatgttaccctcttgcggatattcctacacaaagaaggaatatttttcttttctttatttttttatttttttatttttattttttatttttatttatcgtccgagctggagtggaatggcgcgatctcggctcactgcaagctccgcctaccgggttcaagcgattctcctgcctcagcctcccgagtagctgggactacaggcgcctgccaccatgtccggctaatttttcgtatttttagtagagacggggtttcactgtgttggccaggctggtctgaaacgcttgacctcgtcatccatctgcctcgatctcccaaagtgggaatatttttcttttctgggctttcccatagctttcgtatattatttgtactctagcagttatcaattgcagtttaattatttgttttatgtgtttcccccattaggtatattaggaccttgcacagtgaatggttttatatagatttttaataagtggtgagcttttaaatgtggaaataataatgaaaccttgtctttttagtttgtgctctctcagacaggatatatttgattttcttaataatctctttgaaacacacagagttagtgattattttacccattttatagatgatggaagggaatattgaatctcagaaaaatagacacatattcatgttcaaagatagaacttggacttgagccaaaaaggtctagtgatcttttttattgtaatgtaatgaaacaagagatactgtgagtataggttggtatgaggagaagcagcctataatttgagttaagattatgaagacagagtgaaattataatattatgaagagaaataacagttttgatctaacttatgaaaaaaaaaacaacatgtaagagtgaaaataactctgatgggataaagccccctttgtaaatttagagaagtgcctctacagagtaaattcttaaccttgggttatgtggctctacaagattcattacatttggaggtaggcacacatttcttagagaatgtttatccaattctcaatgagtcttttatccacaaaatttaaggcactgtgttctaaagctaagttattgactgcttcactaagggaaaaattatgagaacatagtatactaatggagtaagattatcgttggggtggctgaaagtaagcagtttgaaatgggattttagaaaaatgcaacacttcagacagataaggtcagaggcttatttaaaaatgacaatccccagtgggattttaggggattacttgacttaaaatttaatttaaatataaggatagtaaagaacattttgaaaaaataaaaagactgtttttccttataagatagcagaacatatcatataggctattaattcaaacagcatgataataatttagaaataaaccaattattcaaccaactggataaatggtcaagaataaggcccatgcatatattgaaaatttagggtttagtaaaggtagcagtccaaatcagtgagaaaaggataaattatttaatataggataaattgtttaatggtttatggaaataaaaaatgatcattacttcattcatactataataaagagcactggataaaaaagattaaaaactcaagagaaaaacagataaaggccatgaacagaaaattcaaaaaggaagaaaaatgtatgacaaatatacatttgaaaagtttttctacctgacaaacagacaaagaaataaaaactgaaacaatttttcatctatcattttggaaaaagatgaaaaatttaaaagaatttgagatggtatacagacatagccactttcttatgtacattttcagtgaacaatatatcaggaaatcaggaagtataaatcaggaaaacattggtgggtgatcaaataatatatatcaatattttaatgtgcatacttttgtcccattaattctatgtttagaaacttagcctaagaatataattgaataagtgagcaaagaaatactatattgcaatattacatataatagtatacatctggaaaccacccaaatatctttcaggacagaaattgtaaaataaatgatgatatatctgtattgagatctgtatgtattgaaattattgaaatgttattttaaactctacaagttgttatgtggaaaaagcaatttagagaatagatgacagaatatggtatcatctaccagtgtgttttcatgcatgcttatatttacatatatgagattatgtctatgtacatgtgtgcctatagttatgtatgtaggtgtatgtgtggtatgtgtgtgtatatatatatgtgtgtgtgtatttatatctatatacatatatatgtagagtgagagagagacagagacagagacagtactacatatatatgtagagagagagagacaaagacagagagagagaatacatatatattctgtctaagcaggaaaaaccaccaaactgttacaggtgtgtgaagagaggatattttgagaggtctttgattttgttttatgttctcttctcttactcaatttcctttaaaatgagcatgtgttgtttttataataagcaaaaatcatgtattttctccttttgtaaaacaatattttcaacttatttcgtttaatatatttcacttgtatttcacttgtttcttaccccccaaaaaaaagcaaaggattgcgtttcataaaaaaatttagtaaaagataaacatgaggacatcaaagagaagagaaaatggcatgaaaatagtatgaactatgaaagcaaaaattcatttcattaattcctgagtaattgctagaaacgagtcacagactggttctgatcttcctatcaactaatccaaggaagggaacactgttgctttaagattcatatatcggtaagttaaaaaatgagttgcttggtaaaatatattgctattaactctgagagttaaaagaaatatttctctgtggtgttttataaaaaagatgctatgtgatatggtgtgtgcagtttcaacattttttctatacttcataaagtttgaaatagatataaatgtttcttataactgtgactgattcttataaaactacacattgatggcctgttgtctaagttccattcattgaaaatctatcagcactggagccccagttagcattcttaacagggcattctctttaagactgaacactaagtgtgcaccattaaaagaagctgcattcttcaacttggaaaattcttctagactcactctcctgtatcccacgttcagcctcttgttctcacctgaatacccgaatttgatttggatgctgtatgtgttctctggtccttaagattaaaaactaaggtcttattttagtttcttgctcaaatattgcttttttgacctgctctgttcctgtaactgtagccctcaagcaagcccaacctaattctcaagtgtggctcagaattctgggacaccagcccaaattgggtcttccttatttgtgatagaatggaaccaaaggaataagagaggctgggcatcttggctcacgcctgtaatcccaacactttgggaggccaagacgggcagatcacttgaggccaggaattcaagattagcctggccaacatggcgaaaccctgtctctaccaaaaaatacaaaatttatccaggcatggtgacacatgcctgtaatcccagctactcaagaggctgagacacgagaattgcttgaccctgggaggcagagattgcagtgagccaagatcgcgccactgaactccatcatgagcaacagagtgatcctctggtattttttcttaaaaaaaaaaaaaaaaagaaggaaaggagaattcagtgttggtatccagctttctgattttctgacatgaacaccccattgtctcgatatttataacatatccacttccagttgaatgcaccaagataatctagttgcaaaatgtagccccattaaatacatggattgacacatttaaatataagccagttaaatgttagaagttacttaccaaaaatgaggttgatgttttagaataatttactcacagcccttctctctgaaagcaattagagtaatacatttttagtctatcgagattgtccaaattcatgataacaatattacctagtatgcaggtgtgcttccagctcacttggaagcatttttaaatcattaaaatataaagtaaaagtttggactcttctatacacacatttttattttactaccactcaatcattcccaccacctgggttttcagttttattgaggaccagtttcttgtctaatgatcagtaggcaggggtctctactgtccagaaatcatgtggttactcatcacggcagctgctactacagacactgaagaaagatcatccaacatggataaataccctgttcttatcagatgtttgagaagtaatagagtataatgatgcccctcatgtagaatatggttctaagaaacccatacttatattaactcagaaactgccataaatagctgaaatatccaaataaatcaacagacccacagtttgtgagaaacagaaggatgttcatggcttcaatgggataggccaaactttgtgttgaattatgtgcttctttatgtcttgtttcctctgcctgaaatgccttttcctccacacccattagtgttttataacacctactcatacttcagatcttgattcaagcatcacttcttttggtgaagtattttcagatctcccaaacctgtcataataccatatagtgctcctttatattgtttattatattttcaattacatgtttaattgtataattattgataaggccaatttctttcaccaaactataaactcctatgaaaataatgactctgtcaatttttctcacattcaaacacagtatttgtacattgcttgaactgaaagaattattaataaataattgaactccagggttaccaattttatgaagttaggaatatactgttaaaagtaagtagaaaacaactccaaattcagacaacctttaccatgtgctttattttattaaagagttaaaaaataactatacaatttattttatgtaaaagacacttcagtttacaaatgcaaatatcacctctggaaataaacctaaaggacaggaagtcattgaagaagtggcaccatggattgccaggatgatgatgttgcaggagagttatatttaaggagacggcaaataaaaaaatgataataaggacattagatactaatttcaatgttattttgtgttttgtcttatgattattttagtgtttatgcattatttaacatttattaataaattataaatactctggctcaattcattctgttagcttggtttaaacatatataaaatgcccacagctactcctgttattggcatctggtagttctgcatgacattaagacccaaaagtaaaaataaataaatttcttgactgagaaaataattgccaattcaaaatggtctactaaccttaacattcataagaagaagagtatgtatcatcatcctggcaaaatggcacttataatttcataaatgctcctttttaactttatgtattatttttattttgggggtagtaagatgtggaagctgttagatagtcattacttctgttgacatggaatattttataaacatgaaatatttcacaaaaaataaaaaaccagtaataacaggtcacatacacactcaataatctcactatagcaatatttcagaaaaaaatgtatttagggaaaacaatttatgtctgtttgtttttagtggcagtcatgacatgaggaccccagactcaagtgcattgccatttactccctggtagaatgtgatttcatttccaatgagctcaaacataatgattatatgtcttactaattatacaaaacatggtgaagaggtagtgtgctttgtgatgtcacatatcaaaaatgctttcttttaaacatttctatctccttagctaggtttaagagataacaagatgggccactgaagtaactttgtcaagcatgttcaatgtaatatttccccagagattgttttaactgattcgaccaaattagattattgacttgacaataatgaacaagatacccctttgaatttttgtcactacatctttttgtaactcatgaaaaatttcaggccaggcacagtggctcacacctgtaatcgccgtactttaggaggccgaggcgggattattacttgagctcaggatctccagaccagcctggacaacagaccaaaaccctgtctctacaaaaaatacaataattagctgggtgtggtggcgtgcacctctgattggtcccacctactcaggaggctggggtaggaggatcgcttgagcccaggggttcaaggttacagtgagctatgctcctgctgtgctgcgcaatccagcctgggcaaaagagtgagacctgtctcaaagaaaaaaaaaatcagaaatgtttgaacccataaagtagataatgaggacatagtgggagtatgtagaaaagcaataacaggccaggagcagtggctcacgcttgcaatgccagcactttgggaggccaaagctggtggatcacaaggttaggagtttgagaccagcctgaccaacatggtgaaaccctgtctctactaaaaatacaaaaattagctgggcgtggtggtgtgcacctgtaatcccagctactcaggagactgaggcaggagaatcgcttaaacccggggagcggaggttgcagtgggcagagattgcgccactgcactccagcctgggtgacagagcgagactttcgtctcaaaaaacaacaaaaaaacccaaaaacaataacatatagcagtgttggccctcaagcagtctggcagcctttttattgctttggatgccgtttgtgtctaagcatttgctttaaatatttgatgtagttaattaatgagtattttggatcttctattatacaaatctgcctatgaaaaataaatgcaaacaaattacaaatttcaaatgatagaagaccaaacggaaatacaacgataatgtcctcaaatgtgcactagtagtttaacagaatataactgccatctgattattaaacagtagaaattgtttaagtagatagttaaaaactgtagtatctaatggttagtattttccaagacagtagcctaagagagtagttcaatatatacggagttccggctgtggaggatggggctggtaaggaaaagcaagaagaggaaataaggctttgctaaagattccttaacttccctataagatgttacagaggcactgattggttttaagcagggaaattatgtggatagttttgaattttttaaaacttactttggtagggccgggcgcggtggctcacgcctgtaatcccagcactttgggaggccgaggagagcggatcacgaggtcaggagatcgagaccatcctggctaacatggtgaaaccccgtctctactaaaaacacacacaaaattagccgggcgtggtggcaggcacctgtaatcccagctatttgggaggctgaggcaggagaatggcgtgaacccaggaggcggagcttgcagtgagccgagatcgcgtcactgcattccagcctgggcgacagagcgagactctgtctcaaaaaaaaaaaaaaaaaaaaaaaaacttacttcggtagatatgtagaccatggagtgggaagaaattaaaggtgtgatttaggtgtttattgcagtaaaccagatgagaaataaatggtgatagtctgaaactgatgctgtggcagtaaaggatggacatggcagtaaagagatgaatttaagagaggttttttttaaaagtggaaatgatagatcctgtcgactgactgacttaatgctattagataaaataatttttaaattacatgtatttccaaaaagtacaattaatgaatccatggccaggcatggttgctcatacctgtaatctcagcactttgggaggccgaggtgggcgaattgcttgagcccaggagttcaagactagcctgggcaatatagcaacatcccacctgtatttgaaaaaatagtaagtaagtaaataaataaaaatccataagtatttggacacctaaggtaaatttaaaatcttgcagttttgttttcctttgttctttgtaatttttagcttgtttgagtgggggaaagtttgaaatattgggtaaggcaaacatttgaaaaygctcatctgcagaggaaatttgcagtgttgtggatagatcacttgtgtcaatacgtgaagcataacaaatgctttttgattgtgaaagcataggtagatatattgcatttcaggtcaccactaattaattgcattaatttagttaaattggttttctcaactcatctgaaaaagatgaaaactaacacttcaaactacttcctcttggtaacatcataaagacaaatgaactttctttttcagtcatttccctccttcccctgttctgccctctctctctaactaggaagctactacaccagcctttccagctttggttttctaatcttaattatttctgtacccatctatcactggaaattcttcaaacactgatgtgtggatgtgtgtgtgtcgggggttgaggggtgagtttggggagtggtgctgtgtgttattgcaaaattatcctttttttgctttatctttaaaaccttttggaaacttgtctaaacttttctttctcttttttttggcagaatcttgctttgtcactcaggctggagtgcagtggcgcgatcttggctcactgcaacctccttgtcccgggcttagctgatcctcccacctcagcctcccaagtagctaggaccagagttgtgtgccaccaatgcccagctaatttttgtatttttttgtggagatgaagtttccggagatgaggtttcacgtgttgcccaggctgctcttgaactcctgggctcaagctccgcctcccaaagtgctgggattacaggtgtgacccaccatgccctgcaaacttatctaagctttttttttgttcttcttcttttttttttttttttttttaggttctggcatacatgtgctgaatgtgtaggtttgttacatagatatacatgtgccatggtggattgctgcacttatgaacatgtatgtttattgtttaagcttttttatcctttttatcaattgtatgtttttaaaaatctctgccatgtgcttttgcctctggctaattctatctgcatagacaccataataatctgttaatcacacttaacaagcctttgcatttgatatacctcttacaaacaaccaaacgaacatgcaggcaaaacaaaacagcaacaacaataaacacttcatagtctttcttttgcttgtttctctaggatgactattcttaagacccacacctgacaagaataattctttaatttttcattttcttagaatcaaggtattgtgttttcatgtagagttgtaaatatggtataagcaaagatacttgctctcaaaccaggattttatatatattttcatattttgtggttctatgtatgcatttttggctctaaatatttgttttcataataccattaatgtgtaggacaattactatgtatttttgttgttgttgtcctatccttttcctttcccttcatcttagtattaggataagtatgcaacagtaattttccctttctatgagataaaaacttctacatcttcctaagataatattactgagatagccatttatagatcattatttaaaaagactttttcatagtgcattgacatacactatcccaattgttcctcatatagaagagttttaagttgaagagaaacataatcaatgtcctctagaaagattcctcttgtagtagcatagaaggggaataaaaataaagcaagacagaaggtggggggagtccagttgagacattatgataaaaatccagtatagcagatagagtcataacttagagcagtggaataaataggttgatattattaggctaggtttgtccattcttagcaatcaattagaaaaaggcaggtggataaagaataaagagatggaaatcttaaggtatgtactcagccaactgggtgagtgatggtagcacttaccaggtcaggggaggaaagctgaagagtttgctagtgaacacacaaatagaaatgttcagtagattattgtcatcatcatcatcaccatcactatcatcatcattatcatatttcctcagcactatcatttattaatttgtgaggcttggtactcctagaagctttgcacagatcacagttcacttaatcttttcaacagaccgtggaaaatatacccttttctctagatgcagacctggaaaatggaacttagaaaagttatagaatatatatgttgttgttgtccttttaagctcagtgtacatgtgcaggatatgcaggtttgttacataggcaaacatgtgtcatgggggcttgttgtagcgattatttcatcacccaggtattaagcctagcatctattagttatttttcttgatcctctccctcctcccaccctccagcctccaataggccccagtgtgtgccattcccctctatgtgcccatgtgttctcatcatttagctcccacctctaagtgagaacatgtggtatctgtttttctgtttctgtattaatttgctaaggataatggcctccagctccattcatgtccctgcataagacatgatcttgttctttttttatggctaatgctagaatttttatgactccaaagttcaggttctttcaatatatcagattttaggaactcagaagaattgagagaatagtgtggattggttggaagttactaggaaaatatgatgagcatcagaaagaacacctaaataagggatgccagtggggaaaagctcaaggatggaagccagaggtgcaccatttaaagtgcaaggaggaaaagaggagtcagtgatgggacctaaggaggaattctcactctgtgctttttcaagcaggatacagattccttcttttttttttttttttttttttttgagacggaggtctcacttggtcacgaggctggagtgcagtggcgcaatctcggctcactacaacctctgtctcctgggttcaagagattctcctgcctcagcctcccgagtagctgggactacaggcgagtgccatcacgtccagctaatttttgttatttctagtagagatgggatttcaccatgttggccaggatggtatcaatctcttgacctcgtgatccgcccgcctcggcctcccaaagtgctgggattacaggcatgagccaccatgcccagccacagattccttcttgtgttcatttgaaatgtgaactctgaacaaaggacagtttatcttggatagtcttattccatgatttatatatcactaaaagagcagagaatctgtagatattataagtgggatccttaataattaatatatggaaagagaagcttaccagataccaggatttttctgcattgcctggaaaaggaggatatctgcaaacttttgtaccctgtgcacttatcagattggacctcagatgggacctctgccccacagaatttctctttaatgactcattgcttactggtctaagaagaaaaataattatagcctcaggttagaaaaattgaaattgaatcatttcacagtcagattaatgctccattagtcccatctatatgaaagggaggagggagtcaccaagtcaggttggaaattccttgggatgattgaatgtaagggagaaaaactgtgataattgacatagtcaaggcaagaacccagttccgaagcaaatattttctttgtgtgaggaaagggtacagtattgctggttcttttttacatataatattactttgtattctcccaatactttatttttttttaaaatggataagaaatcataaccagtagagagagtaaagaaacacaggtctattttctttaatgaatatcatcactcttgagttataactctattatctacagtcttgttaagtgaaaattgtttcctcaataagaacacttttttatagaagttgaagttctcttctggcacacattagaattctccagtattcatatttcagttttattcatggtgtcaaaaggaattgatgtgataaaatttccaataatgcaatgagaatattcacgtttgtgcaaataccatggagatgttgagaagtagagtgaagggacattatgtgaaaagtaacatctcactggactcaccaactctaaatcttacttttttcttcagagatgaggtctcactctgtcactcaggctggggtgcagtggcatgattatggctcactgctactttgaattccagggctcaaaggatcctactgcctcagcctcctgcgtagggagccatcatactcggccatttttttaaaaaaaaatttttctgtagagacaaggtatcaccatgttacccagactgatcttgaacccctggctcaagcagtcctcccacctcagtctctcacagtgctgagattacaggtgtgagccaccatgcctagcttaaatcttgcttcttatatatgcaattattaacaatagaaagctgttttgtattactagattacttggtttttcaaaatttcaacaactctttttgatttttaagaatattggttagaatggaagtattggcataagtcactagttttcaaaaacatacccagcagagttgaaagcgaatgtaaaacgccatggcctgttgattctatcatcgtatagagtatttttctgcttatgtacttttattgttttggtttagagacatgtatgatttattacaccagtattttaaagcacattctccctcttcatttctgcaatgtactgtgtcgaaccaacttcataggtaaaagttgtaaaatattgctaatttcacatggttcagcctaatagaatctcatgcccttttaagccttggagaaggaaagcctctcatattgtctccttccagattcttggctcaatccaagcttctgcatagttggagtggcaaatcccactcctgcatctggtgagctgtgcagttagcagctctgacacttttctacgctgttcaaacaattacagccccaaaatgtgagtgtggccttaaaaaaggctgattccatgtgactaccagattgcttcaagatctgcccagtcatccccctgactgtgtcatcccttaaaaatctgtgtcatctgggtacagaaaattagaagaatgttctcttgatctctgcttaaattttcagaatttttcctttgaaaccacgaactagagaattggaattagacttaatgacttgactctatgtagtatatatttcttttctccaaacactgttttgtatacatgaggagggacaagaaatgaaggaaggggaaaagtatagcgtttcagccccagaaaggtacctttcacaatgtaaatgcagagtatctggttagacatagccattttgctcacaagcacattcagagatgaagacatgcagtctctaattgtttcgttgtatctaagagggtgaaaatagaggtggcatatgaaaaaaaccttccattttcattgagcgtacccatattctatggcatttcttaccagtcagtaggaattttttttcctactgatcagtactactgaattacccaaaggcaaaaatattccctattgtttctttgttttctaactttgttctctagcttctaggtagatgttaactttttggtatttaaatgtgcacactccctgagaccaaactgcctcagcaagttttacttcaatattaatgggcaagatgaatattgtttgatgtttcactgttagcaaaagggaggagaaagaactagaactaagttcaattgaaccattactatgcagggtctatacagtcatgattattatctcagattccaaattctgttcaccaaaaattatgattatcaaattgttaagatagtaaattttatgtgtatttttaccacaataaaaagttggaaaaaatgatttgactatatccaagtttgcagagttggtaagtagctttttattgcaaaaaacttgctgatttgtgaaagaaccttcatttccaaattaggaataatttcctgcaaggaaagactatgctgtgtgtgtgcctgtgtgctcttgtgtgtgtgtgtgtgtgtgtgtgtgtgtaactcttctgttgtgaatccatcagtggttttgcattgtttacaggataatgctcagaatccataacaaggtcagtaaactcatctatcatttcctaggcatgtctgttatctgatctctagcctttcttctcccatcgtcgccaagtttagttctacttgacttccttcacttccttcccattgacctagggagcacctctaagactgaaagggaagtcgtgggcttggtggagttgaggtggggaatctatgaacagataaatcagatagaagcattgtttggtagaaagaagagctcatgagtggcagtagagattgagttaaagagtgggatgaaaaagaatcaaaaggaagtagtacgatttggtgaccaatttgttagaagggatgaggggcagtaagtagtcagtgatgaccccgaggtttctagctggacctagaattgtccaactagtccaaaaatgaaaaaatttgcctttaactaagatgagtttgacaaaagatgaagtaaatttgagggtgtaggtaatgaaaacaagttggctttttctcccttgatggcaaatttcagtgtgtatggatgtatacatttgtgtatttgtgtgtttgtcaatacccattgatttttcttaggttatattcaaatactgaagttgtactaattaagcaaccgaagtgtatgctttcagcatggtacctttcacacagcaccaaacatcattatattattttctattgtagcataacaaatcacaacaaaattagcatcttaaaacaatacacatttgttactttacagtttccatgggtcaggagactgcacttgacttagctgggttttctgttcagggtctcaaaaggctttaagaaaggtgttggccaggattggggtctcatttgaggttctggctcctttttccatatcaggtggctgttggcagaatcaatttcttaaccactgtaaaattccttgaagcttgtttcttcaaggtcagcaggagaaagaaactctgacttctgacttctaggccattttttggagagctaatcacttgcttagaccagaccaaccctgaataacctttgattaacttaaagtcaactgattaaggatgctaattacatttgaacaatcctttaactttgccatattccactggttaaaagaaaattacagatgttgaccatctgggaggagatagtgtaagggcctgagctattggagatcatcttagaattctgcccaccacaatcgtgttctatgtttatgcaggtatatgtgtgagtgtgtatttatgtgtgtagttaataacttaaaaaatgaattacatgtatcccaaaacaagcggcaactgcacatcccatgccttcttacttggattagtttttcctgaagttactccagggtcctgtcttcccattgttaggtttcctttctgctgtcctggcttcacctttcgtagccaagaaagcactaaatttggctctgaaatgtacatttcagtacaatctccctgtcttggcagcagtggtgaggctttagcaaatcgtttgtgatcccaaatgagcttcagcagtttggagtgaggccatggcccacatgtttgatgccaccagcctgatttttgtaatgaaaactatatcaataaggtaagtagtcccttcttaggcatgcattcttttccaattttatgtagtggtcagtcattcttacagtgatacaaataaatatttatgctttcatgtcttttaagcttttagcaacgttaaaagaaaaggagtctgtaatgaatgaaattgtcccattgaacttattttttcagcttttgaggatatatcgagtgtacttcttaaaactgaacatgtgcatttgttacatttatatatgtttccacatatcactttgtaaaagaattagagagagcttatgaaatagaatttaagttgatttggtatgagcaaaatatattgttggaatgaagcaaaggaaagaaagcataagagccatcatagttaattctgtttaacttgttttaactctatcaaggttgggccaatgtggcaatttattaaataatttgctctcattaatgcaaaagaagaaatgttccttagggaaaaacatgttgtcttgggtacaaaattccagcaatgttttttaccacatgagactttatggaaaattccagataacagaccttgccctaatggtatgtgggcaacaaatccagaagtatctatcatagcattctttcttataacaaattttattagaagccaaggctagaatgttgaagctggactccgggcaggtgattcaaatgccatactattactttcctagcatggacagttctggttattaactcactcttacataaaacttttagaaccaaaggattggagggatgctgacattccttagatatcttaggtaataatcctgaaaattcacttttcctgaagtttttgatagcagatagtaagaaaatttcactttaaaactcactttgaggacctgaaatgttatattccactttgctgattgaggtcaaggactattgtttgaacctcaaacaagcaggtggtgaggttcactttcaactggtaattacgagaaaacgaaccattatgctagatgcaaggccacctcatcttgcatccggtaaacatgccaacaaaaacacaaacaagtgtctgtaatacctttcaacagctccctgttgctctcattataaatatggaaatccttaccatggcattcaggaatctgcatgatctgatgcatgtgtatattgacagcacatcttgtatcattcgtgacatcactctctattatttggctgattttgacctaattcagcacttggaaaccaccatactcactcctgccttggagtttttatgcatactgtttcctctacactgaataatacctccaaaccctaccgtcactgcctattaaccccctacttctcctgtttctcagttcaaatctccctttttctgattatgtgtctctgattctccaaatcttgccagttggccctgttagggactctcagagcttactgtagttttatttcatccatagcagcttatgagatttttttcattaatgtctattagccagatcgtcagctccatgaaggcaggttgcaggcttgtttttctgaccactctatcatcaacccagagcacaataaatgaacataaagtgaattcaataaaaatgtgctgaaaggataaactactgttatttactacattaattacaacttttgttagccccttacaaaagatgctttcttagatgctgcatttcccattctacagaggttgaataatatgactatgatagttttagaggagatgggaaatagtttggtatttcttaaattaaaatatgaatctgttagagctagaattttattttctgaaagataatcttgtttagccagtgtgagaaactacattacacaaagaacattttgctagtattatttcgcaggagaactaaacttggtaaactgtcgttcctagaagattgtttttatcaggcaccgttgccttctttgagctttatgaactcatgttttaggacagttagacattactgatggagttagagaatactagaaagtgaacttcagctaaagaaagtgatcttttttctctaatggcaattcagttgcaaagttctatttttattctaaggggctcatagagggtggtccccaggattctcttaggggtctgtgagaccatacatattttcataataacaccaacatgtcatttgtaattttcactgtacattttctcagcagagttctccagaagctatacaatgtgatgcatattatttcataacagattgaatacggaagcagacatgagaacctagatgtcttccattaggtggcacaaataaaaaacattgtcactcttctcacagttttttggaaaatagttatttttaccgaaaataaatttattatattttttgaaaatgaattagtaaataaatatttataattgtctcagttttaagatggcaaatattccacataaacaagaaatctgtgagtcttcaataatttttaagactataaagagattctgatacccagatatttgagaatcacttctccgagccattttattgacacaattttacttgactttgcaacctgaccgttttagataccttttctttccagtcttttctaaaagatcaattgattaattgggttgactcgatgatacaagcacacgatcttcagtatcaaaagatactcatgaccagtaaacccctctttagttctcaattatccaattccctttcctggaggcaactgctactcttgtatttcctaatggagatcttttatgtgtttactcaaatgctaagacataatatatcatattctgcttcctgcttatcttccctaatgatatagcaaggagattgattcctaactctgcatgcaaatctgccatagtgcttttagcaattgcagtatcgtccatgatctggatgagacataatttcaccagactcctgttggagtctgttggattgtttcccatcctttgtcactacctacagtgtagtgatgactattcttttacttatttgttcatgtaaagtaaatatatctctagaattaatatttggaggtggaattcccaagtcaaaggaaggaaatacatattttttaaaaggattttagtagattgttctgaaaaaaattacaccaaacttaccctcacatgactatttttgctttttctcagtatactttttaatagattgcattataaaattttaatatttaccatttaaataagtgaaagcaatgtctaattgcagttttaattttatttttattaaggaagttaatcttttttttttagctgaagtcgaaaaatatgttcatctctttttcattgaagctcattagtttccaaaaatgtgtcctcatttcatacaaagtatctttgaaccattgccaggtcatagaagtgactcttgaagatcttcttctctgggatcaagggtcacatctcgttctcctggcttcatacccttctctctctacacatctcaattaagtaagcttcctttcttatcctctgaaattataatcatctttaggctcccagatataggtgacctgtgccatctagtctgacttccagtttgcaaattatcttcaaaaagtggaaacagcttttactttctactttataaattcatacgtgctcaggaggacttttattaagattgggacatattgcttagttagtctctagggtggaatcataattaatgaaagaactctgtctgatggaaggcttagtctaacaaatcatcctaaaacttcattagacattgtgtaatccccatggacactgttgaagagacacttgattaggcagatcgtgacaacttcagctttgcccatcatacatcctccagagactcctcaaactcaagacagactttctacaggaaggaatggctgtttctatttcagaatattactgataccagagctttgctgcatcttcatgtactttcctttatttttatttttatttttttacagacaaaatcttgctctgttgcccaggctggagtgcagtggcatcatcatagttcactgtcacctcaaactcctgggctcaagtgatcctcctgccccggccttccggagtgctaggattacaggagtgagccaccacacccagtcttcatgtactttcttatgtaaatttattttgtttgagattttctttgtgatggaataagcaattccttccttaactcatttcccgagacatttttggaatttgcaatatatatgaaaaagcacttattctcagtgatggaaacaccattatttcttttactagaatgtgatcttctggttttaatatttatgtctctgtgccaaggtgaaaatattgtagaaatgaaagtataatgagagagaatccagataataagattttcaataaacaaaaaaagaagtatgtataggagtcctgtctgctgcaaattttaagaatggttttctgtcaacatacagttgtcattgcttactgaaaacttctataaaaaacaagacacaaatgattgagaagatagtagagactgaaactagaactgttgatttaataagctttcttactcatatacttaatccacagtaaattattagcaaattacattttcatagtatttcagaattaaaagatcatagtcagggcttaaaggaatccagttgttttaacagtgctggaggcaaagcgttctagcagcaatcacctgtcagaatgacttaggttggattgtttgcaccacacactttactatagttacatgtctttcatgtccctttgtatctctgactcagtttcctcatcagtggtaatagcagaacttacattttagtgggaggattaaaataatgtacatgaaatcaaatatataagtcagcactcaataaataatagtttgtcatcattattactatagtaaatgaccactatctgaaatgggatataaaaaggaaagtgaaattactaaataaatatgagcgtacaaagacctgacaatttagatacaatatactcactctgtctcaaaatagtgtcttctgaagctttagtcagaatattatggtgacatttctgctagatttgtcattgagttgctgggtttgaggaagaacctaggctacacatttctcttggctctacaaaaggctgtggcagtgggtccctgagtaaaccaccagaagaaacctaaggggcacctctgtttttcagttaatcagttttagctcaactgggatttaatcctgaaaatctaaattacatttacagactttaagttattgtgaatatttacactacatgggagaattaccaaaatatattcgttactcatacagttttcgaaaaacaggtgagacatcttccagttaaattcatcttccttttatgtttaatctattgaagaattctaaacattgttttgcaccaaattgctcccttaagttttaagagccacctagtttgggcatcagatgttctcctttatttctgtaaaaatcttgcaaattcactcccagaaagaaatgtagagaatactaggctatttcacagaaaaggcttgctgccctttcctgataacaaggtagttattattcttggctgagcctgtcccagaaagagtcttaggtgacctggtgtgggaattgctaaatctcaggctactcactgagactgtctgctgctgtgctgggcactgcagtcctccagagcaggcctgtcagcatcctaccgtgctctgagtaggtccactggggaacctggtggagtgacatcatgtatcagcctctagcagcaactcctctctgtagccccatgtctttcctgtggtacaaaggaacaagtgctacagggcatgtctgtaatcgttatcccaagggcacgctccacaggcatctaagggtgaaaggtactgccagtctgttgggtttgttatttccatagagctacacaggaaataacaccaccaaaaataacacattcaaactcagagggcaatcttccctaactattcataggcacacgtcaggcattctatacatatacccagctctttgctaagcatagtgaaatgcccttttacattgcaattaattattagccaacattgaataattattggtgagagggtaaagggcaagtgaaataaaaatagagctggtttatttttaggaagacactattttaatgtgttgattaatcagacaggtgtttaaaagcatttgttagagtcaattcacagaaaatctcttttacatgcaggttacagccaaagaaagaaataatagccaacacatttacgatttcaattgcaaaaattgtcatatttttgaacttgtgtgggtatttgaaaatattagctcctactaggtccagttaaagcttttaattctataaggtttcagactaccagctgaccactgctcagcatcccctggactccaagggtttcatctaagacatctaaggagaatgtctacccgcacatcgcactaatgcccatgactgcactgcttgaaccatgaggttattgaacagaaagcaaatccttttctgaagagcctccaagatgtggatatttcagttaatttcagctccctgccagctcagaagaatgatgctgtgctgtgtgctgttcccatgaatactacacgcagggcactgctcagtgactcagccttccagggagccagtcagggttttgaagctgcatcgtccctttcatccttgaagttcttttggatttcatcaatggcatggagggatatttttaaaacaatggagatttttcaggactggcaaaagggctcccctcgtcacagtgccaaaaccatcacaaacataagttatgttaaaaaaaatcctaaactaaaaatatctggtacttagggaactaaaagacatctcatgtttgctatcatttccatcagagctcaggtcaatggacagagatcaataccaaaacaaacatgcatacttagagcataaattcagataaatgctggagaattaacatgtagatagaagtaccatcatgcctaaaacaaaaactcagtccaatggttgtttcagtgaactgactagccttcatagagaaaagtttattcttttcaaactgaagttaaaagatattcggtgcttcattcgaaattttctatttcatgatttttgaagtagtgatttagaactctttaggactatagaaaatcatttttcttctaaaatgttgtcttagtcctaaattagaaaaaaaaatagtaagaaattaacaaaacaaaaagttaatagtattattcacatatataaataatgggccatcatggtatctgattttgataaaaggaaaatatactctgggattatttttccaaattctggcactctatttatgagtacctagacagacactagagtctcatggaatttagtattagaaatgctactttggagtacatttgatgtcattcaagttaaaaaattaaggaagtagattttcaaaataggtagcataaaatgtaaaattattgaatgttggagcaagaagatcatctaatgccctagcagttcttaatgttgcttgggtcatggatcccttaagaacacgataagagtttaccttcttcctccctagaaaatatactgctttttcttttataattaaaacaataatatgaaagttaatcttagtccagaagtcctaatagcccaagaatagaaatgtcaaattcatctcatatcattagtttgtaattttccgttgcccttttaattccaataacacagaagctgtaaaactgcttgtcatctgactttttatttgtcattacccaattgagcttcttatattacagataaggaaattgaggcacagagatattaagaaacttttccgcaggaaaaaaaatctgctagttattgagctgggattcaaattcaggtagctgattctagtgtgcatgtgctaaccacagcacatactgtggctaaccatgcctacactcatgctcaaaactacgctgtgataggtcttattagcatccccattttacagacgtggagattgaggtgtagagtggttaagtgacctggcaaaggtggcaaaactagcatcacagtcagccagtctggttccagaggtaggaactaaaccaacacactgcccttcacatgcctgtgtgtgagttcgcacacccacacaatacatgaatttgtacatatgtatcttagaggtcagggtaagctgaggatacgcatgacaaatgggattagatatgactttttccttctttctttcttagttttctaattattttgttttaagcaagcattattttggaataaaaattataaatattatttttaaaaagcaaacaggttgataacttaaaatgtgttagctggtgaaacgtccagccttatggagtaggcccctgaggtatagaaatggttttgatggcataggatgtagccttgggaatgtcctggaagagtaggagcggccagttaggcattaacactcaggagtaaggagactgcatttgggatgctcagctgattggagggtggtgttgagtggtcccctgggcagtgagaagagaggccaatagcactggcacaggaggacaagcaagttgttctaagtaaactctcaaatgaactgagagataaaaactctaaatttggactgcttcacaatttgcctaaggctggccctactcaggcctttgccagctgttgttttcttttaagcctctgatctgcaggaaaacagtcctgatttcacaaagctttaacagaatttttataaacgcagatttggggctccatatccacaaagttttccatcctttattttgagaatctgcatatttaacaatgatcctccccaaggaactgcaatgcaaatgtccaaatacagtccttggtaatatgtgttttcacagggtgaagtttttgtccaacactgtgagatgagagctgggggaaaaaaaatgaacattaaccatagaacaggaatgcaaattttctgaaaagtagagcgctactcctctcctctctttttctccatataattgaagagacactcaaattgattgttttcccattgtttcgaatggttgctccatgtaattactgaactgaactggtagtttggggggaataggggaaattcagagaatgttgtgtagaagtagaagtctacctatgtcaatgacctattttagcatttttctctattaactggctaacaattcgcttggaaactcctccagctgaggctttgttaggctttgctgaaaataaattaggtgactcattaaattgttgctggagttaaaaaaaattaggcttattgattcttaaatttctgctaaaaatgttgctaaattaaatataggttattgtctttatcaaaacaaataacccacagcttctgtattgctttatctgtattcaaaagtttgggccgggcgcagtggctcatgcctgtaatcccagcactttgggaggctgaggcgggtggatcaccagaggtcaggagttcgaaaccagcctggccaacatggcgaaactccatctctagtaaaaatacaaaaaaaaaaaaaaaaattatctaggtgtggtgttcgggtgcctgtaatcccagccacttgggaggctgagtcaggagaatcgcttgaacccgggaggcagaggttgcagtgagccaaggtcgtaccattgcactccagcctgggcaacagagcgagactccatctaaaaaaataaaaaataaaaataattaaaaaaaaaaagttcgaacaacaaggttatgttagcatttatcagaaactaatgataatttatgtggtattaagtagggtagtatcttgaatgagaaagaatactgtagtttggattctttggaggaccttcggtttatattttatttgcaattatgtttatgcttattatttctgcttactttgtgactaaaagccagttaaatgtgattctcagatttcattttcagtgtttttattagaatgtggtcttttaggatttaaacctattttcatcttgcaagtatatattttaaaagtgattcatttaaatattctgctcagcaattagcacaaatgttgtcactaaattattacaatagtagctattaacttcaataagtaaaataacagttccctattgtataatatatttagaaaaaaatcacttagtggggtgcatgtatgtggaacaaggtgaagactacctatctcatcacagaattcctcaattaagaagaaagtgctcttaattacatccaatggcatcattttcatgaagataatcaataacaagtgacttatttcagtgtctcaaattttcaagtttatgcatccatctacttcacagcatccatctccatgggccccaggctgattcttgttatccttgctcaacctatccattctcacagtaaaaagccatgagagccattattttttaggaaatgtgacccattatccccaaatcactgggaaaatcaccttactcgacgggtccttatagctatccctaatatcttgttgatttctcctttaacctttttactatgccaatgaaaatggagcaatgtataactcaataaactccaattcaactgtcaaatatccctttcttcccaaattctgtttaagagtctgtgggcctcttccaactacaatccctgcacacccatccttagcattagccattgtacttttagaggaccaatttgtaaacttgatcatatcaatcttgaaatctaggaacaaagaaccaaactgataagctcttatatccacactcaggagctcatcttccctgattaccttgggctccaagtaccactttcatgagtgcctcacttgtgtagaatctcaccatggtacagctcatcacaccattttattatccagcagtggaaatgtaaattcatatccttttaacactcacaaaaggagtcaatttcagtcaatttttaggaaatttggtgaaagtttagttggttattatcctgttcttcaaaaagcacatcattagacatacttttaaaaaaccagagaataatcttaccttataaagacaaatgacacatgttgctatgagtttaggggagggttactaaccttattatcatgtgaactgtttggaattacctttgaaccctctatacatggatttctgtcggaggcctaagaactccttgtcaggagaaggaaatggtagaaatcagatgaatggtgaagtatgaccattagaaaccaccctctatacacctacactgcctatttttacatcaaacatagcgaactgtcctttaggaagcagaaaaggcagagctgaggaaatgagaggcacctctcatgtctttaagaaaacaactaagtggcaatttctggaaaataggttattgtttgtcaggtattagcctgaaattttgcttgaattgtttctccctaggaaatgaaagatgttcacttcttagttgttttggaaaaacaaatacttactaaagattataatggctatcaatttaaacaaacagatgcttttagtgtctttgtgaataacactagtgaatttgcaagaattattgctttaccaacaaagcataaattcccatgttgcttcagtacttgtgcagtgtttgttctggagcctctattcaatatcaaccagcgtatagtagttcctccgtgagagtctcttgtaaaaacttacattcattcttgttattattttatctgagtgaatatttgacaaagaccaaagaaatccccttgagactggtacccattttctctaatttgaaagatattgactaattttgttagatcccaccatgaaggcaaaaggaaaatatattagctatcactgtggcttaaaacaagaaattatttattatttttaacaaatctgaggggcaactggtgtttggttgatctatgttgaacttatggatagttatgtgagtgtcagatagaatcagacatctatgtgagctggcgcatctccattccacattctctctcatctttcttctgggactgatgagcttgcctgggtgtgttcttctcgtggagatggaagaggtggaagaaaacaagcccaacacaaaagcacattttcaagtctctgtcatgacagttactgacatcccgtgaatgagggcaaagacaagcagtggggcaggtcctcccacccttgatgggagggctcagaatgaatacatagatgcaaggagtagggatttggggccagatgatacatcctaccacagagaggtaggatacagggaaattctaggccctccagtccctttgctccaaataatcaccatagttgagacttgaactatgagagcatcaagtaggaatgccaggtgagcttcagctgctgcccaagtgtctaagaacactcattcacctctcagatactcacatacctatgaaatgcaccaatttcatatcatgagccaaagtaaaactcagaatcattgaaatatttgtctttgcatagaaagagtcccatatggaaacaacccagcctacctgcttgacttcctgcctgcctgcatgcctccctactccctccctccctcgctacttccttccttccttccttccttcatctctccttccttccttccattctccctacttcctgactgcctatgtgctttcctccctccccccttccctccccccttccttctttccttccttccttccttcccaccttccttccttctgctctccctcctttcctccatttctccctctctcccttatatttcttcaattcttatcatttgagtatctagttaatgagttctcatttgatgttatagatttttttagctcttcctcacctgtattccttggagtaaattttatgaatcttagaaacagagtctggctgataaatttattggtgcatcaaactcattgagaaatgtcttccagtttcatcttccaaaatgttactagttctaaaggtagtggttgatagttcacacaaaaaaatcaatactgattcagaaataacttgctcatcagggaaataaacctggaaggttttagtcataatttatttataatccctccctatgtgatattcagagatgaaatttgaggtgaaaaaattcaagtattctttttcatatattttgaaaatataagagtctttgatgtattctgggagctagcatcttgaaaagaggaataaaaaatgacttatctggagttaggaaggtgctagtccatcacccataaaccagttaaagagataaaggtgatttatcagaaagtacaacaaaagtgataacaatagaatattattctccataccaagcaagttacaggtatcccctgctctggacaaatgcgtgatgtgtaaacccagattgaccaagggcataagggagatgtagatctgtagctttagcacacatgaccaaggtggtgcacttggtgtaggctctcggctgattgctgactttgcacacttgcggggcatttcatgaatctaaattcgggaataagatttagaagctggcagatgacgaagagattgtttgggcaaccaggactcttgtatgtgacataatcaatgctgaagttagttcatcatcccattccttgtatttccaaatctgtgatgcttagggccttatctagtgccttttaccaagtgggtgggttgtagaaaaaaaaggactaatactcattttctttgaaatataagcttttgaaagaatattttaaaaagaggactaacattttagctttcatgtaaaagtttgaaaaaatgcaatttcagtacttggaaatgagcattttaagactccttgttgacttcccttgtattttaatgcatttctagagagatgtctgcttctgcattgcttccccatgatttacttcagttgaaagttcagccagatccattattttctttctttgacacattatgcaaattaaatgcaaaattcagtgatgagaggaagaggtctcagagcattgagcagatgccgtgtcggtaatagagtaaggcaattacaaaattacttgcagccactgtgactgtgtattttcccgtattctgaaaagaaatctgtcatgtgctcatcactacgagatttatttttccattgatgtgtgggagatttatgcatttaactgtcgtacacattgatgagagaaacatgcacctacagaaataattttttatagattagtgagatatttaattctgactttcttttccactaaaatgatcctttgtaatagtcttctcttcgcctgtattgtaagtatgaacatcagaatggctcagtaagctggaagagcaaaaccatgtctgtgtgtagaattccaatgccaaaagagaaataccacttatcttccacttctataaataaaggcaatagcaaagtcattaacaagagcaaggggtgaattcaatgatctctaagatttttttccagctaaaaatgatatgattcttatctattactaggaaatagtggtattgaagtagaattatgagctctacattcagtctacttttcacatcggattgtcatctcatttttggagggtaattctctttagattctctagtcctaagctgtaatatgtcttatagttgtcatattttagtgaacaaaccagaaaaaaagattgcctgcatcatatgtaatttttgttcaatccaagggcaatatcgtagaatacttgactcatagtttaaaatgatcatttttattgagttcaaattaagtcttctgtagatataataattatgtgaatcaaaaatatgtatttgtgtgaagaaatgctctttcttttcaggcttgccttcaaaaaaagttagtctcatactgaatggcaataatttcttcttcctgcctcctaagaatacattgaggatataaaattatgagactagaatgctcttatttcaaaaacattcacagtaggcattggcctgagcaataattgtgaatgtttcatatttagagaatgggtagattattaaatatgaactatgaaaatttctacccttctggtttttctgtgggatataatcctctggtcttaaaaattaattttagtaatggattttcacaagttcccttggagagcatgcttggaacatttttgtgacatacactcttgaggttttccttctaaatttcttttcatcactcattttgactttcagatttcttaaatatttgttattacgtgtatctttgtaaataaaagtgaggcttaagaagtttgactttgttttaggatggaaccttgttaaaagtacaagcacacatgtgttgacagcagctagaggaagcgtgatagtgtggaaagaaacagaagtccaaagacctaggggtacatcaagttccattatttaattgtcatctttgtctttgctactgaaagtatggtccacagaccatttgcatcagcattgccagggagctggttagaagggagaatctcaggccccttctagacttactggatcagagcccgcattttggcaacattaccaggaactcatatacacactcaaatttgccaggctctgaactctataatctccagcattctgatttctccaagtccctcctttctcatctttgaaacagagtaatttctacctcacaagtctagtcgagaattaaatacaaacatgtaaagctgctgtgttcggtgcctggcatacatggctgtcccccattcctgccaacacacaccttcaagcaagacaacttgagagaggctgagtgggagagagggtgaataaatgttaataactcacattagagttggcattttttttctttttacttgtctctattatatagggtgactgtattaattgtgcaatacctttgcttttaaataatactactgggataaaagtgagattctaatctcacatattatttcaagataagattcagatacagagttttaaagaaccacctataaaaatcaaatccacataaattcagaggaaaatatcctcaatgcttatataatattggatgtttagggtgataccctctaagcacaacttcaaaggaagaaatcattagggaaaatactgacatatttgagtacatatatgttttaaaatttaatttacttgaaaaggaatgaagataattaaaaaggaagtcacaaattgaaaaaaattatatgcatagacaaagagttgataaatttaacatagaaacaggttttacaagacaataaaaggataaatgtaatgattttcaatagatataagacattaataggtgggcatgtaaaaaatgtcaagataacatgaaaaaattagttttactactcataaaagacatgcaagtgaaaacaaccaagatgccatctccagtctatcagatttctctaaaaatgagaaagcgctcataaccagtgaaggagaaaaggatctgctttcatcttggttaagatatacattgcaacaatatttatgggaaattctttggctatatctatcactatgaatttatgcatacatttttcacccaataattatacttttgagaagttatcctaaggaattaatctaaaactgaaatgatacatgttcaaaattttcattaaagaaaaccaccaaactgtaccataatgggaactattcataaatatgtaaattatgtccatatgatagaatactaggcacccattaaatcatgttgtaaacaatatttttattgaattttttaattgaaaccaaaaaagagcaagataaactcagtatacatagcatgtcatttttgcaaatgtgtatgcaaatgtgtaacatgtatatttttaagattggaagctggtacactaaaagtgaatgttaattctgggttatgtttttcccaaatttttgcctgtttctgccctgcctctttgattttaacattgagcatacatttatagtttaaagactgttaaaagtggcacttagatatagcttaaaaataattttaatagcacagggaaattattttattaatgctagttaaattagacgaaaatataaaattttaatggcagaaatatttcaatttataacatatgcataggaaactgaaaagagtagttagctctaaatatggggattatggataaattttatattcttcacttttttatttcaaaatttttataattagctttaggatttttataaccagaacaaattacatttaagactcccttctaaacttatttgcttattttcaatctcaaattgtgaatttgtatggcctctatatttccaatctaattttacagacattaaatttctcttgaaattcagtgaaaaattagcagagtcgaagttacacttctgtatggcatttaaattcctcctcccagaatacagccactgttctacagtacagaggagtccttcatatcacgattttcattgtgtctaagaggcatgtgtttccactttgtcattatttggtctaaaaggatttttcttctattttgctgctgtttttgtacaagacatataaagaaaggtgttaagggagtgttaaatataatcaaggtgttaaggagaagagcccagagagagaactcttaatcttttcatctggtccagttgtcaaagtcttttgtctttagccatcacttttttaatcagagacatataatctattaactatgggaacaagaaccacagatttagcctgtgcttatctggaaacctcccctaaaatactactgaacgactctttttttttttattcctgtctctttttctgttgcaaactgattgtccactataacctggagaggggactcaatttttagaaactgtcttatacacctcttaattagttacctattgctgcatatacccaaaatttagcagcttaaaacaataatgaaattttattatgcccacagtttctttaggtctgtagtaatttaagagaaacttagctgggtgattatagctgactctctcatgatattacagtcatatacatcaggactgcattcttctgaatacttgactagagctggaagattcacttccaagatggctccctcacatggctggcacattagtgcctgctgttggggggagacttcaattctttgttgggtggtcttctccatggggcagcttaaggatcttcatggtttgtgggctgtttcacaaagtgtgcgtgatccataggagattaaggtggaagctgcaatgtcttttatgatagagcctcaaaagtcacacaatgtcattcccaacgtatcctttttttcacataggtcagccctacgcaatgtgagagtgaggaagggactacagaaaagaatgaattcccagagatgagtaggatcatattgggtgccatcttggaggctggctaccagtgaagaagactgctttctggccctcagtgatttacttccatctcacatgcaaaacatactccctttattgtggttcccaagagtctcattctattatggcatcagctcgaagtccaagatcttatcatctaagccaggtgtactagttttctttgctgtctaacaaataatttaaaaaatgtagcagcttaagataacacccatttacatgtcacacctctgtaggtcagaagtgtgggcaaagggtagctgggttcttagctcgaggttgaaaccaaggtgttagccatggctgcggtccttatgtggagctgagggttctctttcaagctcatccaggttgttggcagaattcagtcacttgtgactgacagactggtgttcctagagaccacctgccattctgtactgcgtaaccctcttcacaatatggcagtttactccttcaaggccaacagaagaatcttcctactgcttgggttctctgacttcatttgaccctgacctctaaacccagatttaaaggttttatatgattatatctggcccaccagcaaaatagtcctttttattaactcaaagccagctgtttagtaaccttaattatatctgaaaaaaacagaatcaaaggagtggtatctcgtagtattcacagattctatccacacttcagaagtggaaattacacaaggcctgaacatgaggagatgggaatcttagaatctgtctaacataccaggtctatgtgcaaataagatcaatctctgttagtttactcttatggggtaattaattaccccaaaacttagtggcttaaaacaatagcataactaacttctcagtttctatgggtcaagaattcagaagcatctttcttcagtggttatggctttggcactcatatgaagttgcagttaagaagtcagtcagggtgatagaaatataaaggcttgactggggctggaggatgtgcttctaaggtgatttactcacatgatcaagttggtattggctgttgcaggcaggtctcatttcttccgcaaatgaaatgctctccaggctgcatgagtgtcttcataacatggttgctgatttacattggatggagagatcaaagaggatgagaggaaagcagcaatgtgttataggacccaacttcaaaagttacacatcattgcttctgccctattctgttgggcaatcctgatgcaatataggaggcaccatgaatagcaggaggcaaatatcatctgggctttcttgttaacctcagttaacaacaacaaaacaaatatttaaaaaactaaaggaaagagatttctggaatatttccattctctgtcatgcccactgccatagtctactcaagttctcatctcctattggacctctgcggtagctttataagtcctgtccttgtttccaatgtcatccctttcaaaacgcttcaaatagcctccttaaagccatgactcctcccacggttataaccctgcaggtaaaggcacttgaggacataatctgtaccatctctggcgtcatccctttcattccccttcacctcccccaactatttttgtatttcagtcatgctggacctcttaatgtttccccaaaacatcctaagcaatttcacgtctctatgccttttcttttcctgttctctttgcctgaaataagaacgacagataatagtgactatgcaagtcctaaaatcgaggcagccacagtgctaaatcacacattggatagttcaattttattcttataacaaccctttgtggtaaatcttattaccatgctcattttacaaatgggcactcctaacccgatgtgcataatgattaaaaacatagactcaagaaaagtttggaggttctggcgtaaccctctttgttattctctatgcaactagcttaaaaataacaactttgattattctaatctattaaccagttttcagtgtgtctgaccaaatcagttgaattttatttttttaaatatgtgtgtgtgtgcatgtgtcagtatgtacgtgttaaagagtagagggaggaagttgaaaatctgacatttgatttatttctcctgggacaaaggaagtttggatatgtcaaactgctggctaatcaacacgttaatcaatgcaaatctctagtatggatatagttatattttgcccccctcttcctttccaaacttctttccagtctcatgaccagcttattggcttcatattaccaagtaaatatatcaactgcccatatgtatagtacccagacaatgagaacactgcctaaatattgtgttttcaatactacttgcttttagcaacaaatcatagcacccagcctaactttaaaaattccatgtcatccaacttcaaactataacaaaaattgagttttacagaagagtttcaaaacatttttatgcattagacacttcagaaattatctcttaaaaacaaaacaaaataaataagggacaaaaacaatagaaaacgtcaggcaccaaactgtgaactctcttttgtccatgtatgatttaaaaaaaaaaaactcactgatggtaatttaagaaatttgacctttaggaaaatcaggctgaggctcatctttgtactttttaaaacaagtcaataaaacatataaataatagagatgagtgccgctcacaggggacactcatattttctaggagcctgtggatataaacaatgaatttcatgaacacagagcacatttctacatgatctccttttctttacaagttatttatgttttactggaaatattaaaacttcatgtctctttgttgctcttgtttctttaaatttttatttttatcatcagtcattgttcaataactcaaaatcatataaaataaaacagtttcaacatcattccgtactcaagatgatctctattaaataatgatttttttcttgaaaaagcattctataattttttttagttttccagatgactatttaaaccaaatgtttaaatgaatgattaatgagtcttttatcttatttatcccacctgcctactgcaaaaagacatgaatttaatacattttagattttaaacagttgtatatctgtaaaaaaacaatttttacaggtttcatattctggacactagaaaacacttcctcctcacagcgccgagttgtatgaaaaggcagctcaattgtctttccttgagcagccttgtgtgcctgggtattcccttccatctctcacccatggagttcatattcctgttgtcatgtcaccacctctgtcaacgaaataggttctgccatttctcaaattttatggagaattatcctgatgagttaaggcagaggttgaaaacttgcagcccttaccccggttacggattttatttttaaaacccagtgtttttgaacactttacagctgatatttctattctaatggatgcattatcttcttttaaaaatacttcctatattagccctcttaaggggtatgaagtggtgtctcattgtagttttgatgtgctttactcactcttaataccgttattataggttatttattgttaaaactgtgatatattttcctttattttctacatatacatagataacatgcagtttgataatctgcatttaatcgcattagaaaggtattttgctatgtcattaaaatttttttgtgaacatcatttttagtggctgcaaaaacttacataaagacagacatgtcctaatatatgtgtgtgtatattttaactaaatattggcacaccaaaaataatggatttaatgcaactagcaatgataatgctcaaacaacaggagtgctatgaagacaatgaaacaggtgagttgtcagaacaccttctgtcattacattaacttttttaagcactaaattcacttgaaattacaataaacaagataagtacaagcattagataatttgacctatcagatatcccaaaggcataaactatcactagagggtcttttctttatgcaattaggtgaccagtgactcttattttttaaagcttttaaaataaaaaaatagctttagggataaaaccagccagatttttatcgtcaaaaacatgttcacagttcagctaagccttgctttcttttgaagaattgctctttataatgctcaccaatggatttagaaatatcccattgtaatcatgaagatctcaattatatgttatgaaataagaaacataatgaaatacttgaaccttcctgccccgcatagcagatatatttttgtatttatgatattcacagtaaaaaagctgtgctgagaagctcaaaatagtatttgatcttagtggttttggagcagaggaattggcattgccatgatttttctataacttggcgcaggccaatggtttcaggcaggactttcagagcagacttctgtcaaatttgccatatggagttactgggctcagattatagaggttttcctggttgtttgcctaatttgggaattatcagtgctctccaggattttctccaaaaacaaagaacatgttcagaagaaactgacacttcaggaagaaaagtagtttgatatttgagaggtttagatggtttctaatatttctaaaaggtaccatgactcgtgaagaatttgactggtaaaaaagaaaggttcctgttatccctggaacacagctaacagtctggcatgtagccttacctgaactggtaccctccccgtacacctcacacttagcattctgcacagccaaagaccctgtcagttattggccagcctgaagaatgaggttgaattcaactcagggactgaaatctactttatagcattttaaaatattgtagatccaaccttgagttgacctactccgcaggttcatgggtgattaggtgtgagatacaatgggaatgaatatctgaaaaccctttgcagaagagaaggaggaggaggaagaataaatccaatttttacaggtttcatattctggacactagaaaacacttcctcctcacagcgccgagttgtatgaaaaggcagctcaattgtctttccttgagcagccttgtgtgcctgggtattcccttccatctctcacccatggagttcatattcctgttctcatgtcaccacctctgtcaacgaaataggctctgccatttctcaaattttatggagaattatcctgatgagttaaggcagaggttgaaaactcgcagcccttgctccaattacagattttatttttaaaacccagtgttttttaaaaaatcgagggagtttacacaaaaattcatgttttctgtttctctagaaaacagcaaatctggcaacaccctgctcacattcccacctaccaagaatgctgcacattaaatggtggcttttctttaggtgactctaattcactggggtctccatgtgacgtttcagcctttgcaccctacttgtccgctgcaggcccaggagctctctactcctcatatgcattacaggaccccatgcacattgaagatgttttctcaggcagagcagacaccaggcaaatatcttctggtcttaggagcaagtcttctgagaatcaatgatgacaaatatcttaaatggtctactcgatggttctgaaaatgtaagagctaaactacctgtatcaaaatcatcttgggggcttatttaaaacatatatgataaggccccacctcaaacctaaggagtcagaatttctacggaaaggcttgggaataggaacattaacacaagcatcccgggtggtttttatgaaacaaagcttgagaattattgaattcttctccgatctgacagctcttctcctgggcagacccaattagagggaactgatgagttttaggaaatactgtaattctaactcatcagtccagcagtgctgaaaatgcagaattttgtccttatcaaaagccaattaatgctaaccttttcagtgtgtgtccagtaccaccatcggtaaggtaaataaacaggcagttttgcatataatctagtgatttttaatttagttttttcccttactcatcctaaaaaaagcagggagtcattgggcttttgtatctattttagctgagttattattttaacccctatctttagtgcagaattaaaatatcacccttctatttgcttttattcctaatatctgaatggtttcagcttgacgcaattagcatgtagagcatgctcacctactgtaatctcccagatgagtcactcagctccagcacataactgcttctgggatcctgttggctaaccaggctttgaaacccagggaaaagaactgtgtgttttcttcagaagtaatccataaatgagaaattaccataaataggcagttttattcactctaagtgatttttacataaaaactgacaaggccgtaaattgtatatagaatcaggttccatatccacacagctaatgcacacatgaattattcgatgaaatttgcttcagtagtattatctgaaattggtttcagacaatacattaaatgttacacattatggtaaatttactgtatttttgttccagccacgtcttgtgttggcaaatctgctaaatttaagtttgcattgtattcacatgtgttgctatttcctgagatgtcccaatatattttagccatcaaacaaatagaacttcacctctctgaggctcagtatccacacttgtttatcatgcaagagacatgcaggtgagaaaataggcaactgccattctatctgtgattgctgttcatggaagaagtaaaaatgagctgggacaatatataggtggcgccagggatggctccttgaaggaagtgatctcacagctcagacctgaaagctgagtggaagttaccagaggaaaagagaaagggaatgcattggttttctattgctgggtcagaaactaccactaactcagtggcttaaagcaccattcattatctcatgttttccctgggtcaggagtcaggtgcgtatcagagtctcaagaggctgacatcaggtgtttgcagatggcattcatgtctggggctcagggtcctctttcaagctccttcaagttgttggcagaatttagttgctgtggttttaggaccgaggttcccactttcttgctgatcaccagcctggggcagctctcagccccttgaggccacctgcagttcctcatcctttggcagatcctctcacaacgtggccacttacttcaagaccagcaagagaatgttcctcttcaggaagggcccaactcctccttatggatgttcttctgattcagtcaggcccacccaaaataattgccatttttggttaactcaaaaatcaactgatttgagatccttaattacatcagcaaaatccctccaccttctccatacataataacctaatcatgggagtgactgttcatcctgttcgtgattaggctcacatataagagaaggagatcatataggacatgcatgtagaggatagaatcttgggggccatcttaaaattgtgcctaccacaaggaaggattttccaggcaggaagaaccagatatatgaaggaggcctaaatgacaggatagcaatttccagtgtctgaggctaaggctggaatgctgacctggccagatcatgcactgctaggtttaatggcctatgcatactctattatgcaattattaaaatacctgtttacaaagaatatttgaaatattaaaaaatggaaaactgcataccgtaaaatattaaatgggaaaatcaggatatgtgtttatataacatagtatcagttttggaaatatatatgcatatcttaaaagactagaagtaaatacatccatctgttagccatggatatctctgggtgagaaagtatggatgagttagagattctttgtcccttttcttagttctaaaatttgccacaataaatatgtattctcttataataataattaattaaaaacctattcatggtacttgcaaaaacaaatgaatttgagcagtctctttgaaggaatcaaattttgtactccaggtgtttgagaggttgaaaaacaagctcaggaattagctgcgcatgatctgtacaaacaaggggatcagtcagtggaaatgaagtccagcttcagccaagggtggtgagtataacagacctactctgatatgtttcatcactaaacattgagcaagaaatctagtgtttaaattatggaggcattaaagcaattaacctccctctacctcaattttcttatatctaaaaattgaggggagcaaaattccattcttgtcacaggtctcaattgcaagtagcatgcaagcaagtaggctgaactcttgtctgtcaatctagctccttcctggatggggtatttaatcagctctccttcccaagcacccagtggacttgaagctcacagttagacagagatggctagaggtgccaagtgctgtttatcataggtgacatcacctgtgtgctcagagttataaacataggcagcttgcctactgccaaatccattacaactttcagaggtgttcacttaggaagaggaggaaagagttttttgagaaccagatgggaacttagaaataagtaacattgacaaccaaatccttcagacacatcttcaagtttcaagagagcagttaacaaaaaagaaaaatgtatttttagaaattgtttgggaggtgaaaggatttttctgggggggagtagggtagggaatggatagagatgatttttttttggctctgcaatatctcagagatctttgagttgaaatataacaaaatgtatttcctctctcttgctccaaaaactgaaaagcaagtgcactagaaaatgtcagagttggccactgaacagaccatatttctaattcatggcaagatggctaaaataaaaattcttgaaatacgtattttaaaattagattttgacctttgatagggcttatcatgctatttatattgtagcagaaggaactgattttttagtagttgcctcatcaaagacatgactcacatttccttaagcatttacaccatatgtttcctgaggtaaaaaaataaataaataaattttatattttttatacaattagtgaaatgtgagcaaaaaatataagaaatcatttaaaaaatattttggggaggatgtggtctagaaatgttgttttctagaaattgaaattatgttagctatttggccagtgtagccattaggtacatttatgaatatagatgagaagtaatcattgtgatgctagttttatcattaaggaaaaaagcagaattcaaaagtttagcaatgaaacactggtactactgaaactcactttatatttgaaaatgtgaatgtgagtttaaaaaagcttttgttagactaactgaaaagaatcattttaacatttaaaaagaaaaatattattttaagtgacatttggtgacattattatatgtgtacaagctgtgactataagataatgagacaaattattatgtggccagtggaaattaaatttatctttatgattactagcaacagggactattttattcaactatctttacataatacaaaattattgtaaaatttctaggaaattcatattccacttaaaatatgaggaagtacatttggaaaaaatattaacatatgaaaatcagcatcccagttaaggaatccccagtttcccacttggtgctcaaatcacttcacgttttatttcattggtactttttctagggcagtagatttaggaatagaaaacagactctacacatggaatacactaaagtcttgaggaggtgtgatatttccctaagtttggataggtggtatcatcctttcagtcactcttgactctgcattagactctctacctaatgatccccaagtcatttcacttctgccttcttaacattttgaagatgtcctctaaaatttcaagtcccaccatctctgcctccgaactcacctccctgactttcagtcttgaagcaccttaacaacccctcccctcctgtgcatgttccacctggaaaccagggtgatcactctgaaatgccaatctgatcagtcatttccctacttttgaaccttcaataacttcctagcacctattcctagaaaccattccaacatatcacctaggcaaaggaaacccttttcttacctggctcctacttatccctccagattcaccttttgacacctcccacttcatctctctgcagcccccttcctgcacacacacggagtttcagtcttgccaaactcttcgcagcttcttgagtggaccttgctctctgcactacaatctctttctgcctagagagtcctttacctcccccaatctggttaacttctactgtttatttaagtcttaactctaagtagatgtcatttttgaggatgctctctctgttcccactttggaacttgggcttctctgttgtcctgggtgtcccgtgtattcctctgtcatagccctcatctcattgaattgtaatcatgtcttcactagtgtttcctttctagcatgatagatttttgtattgccagtgaccccaacaaattccccaggtcctagccctgtgactggaacacagtaggcatttaataatagttgacaaatgagttagtatatgtaatgaaaaatctacctgcctgagcattaggaaatataaaattaatctaaactttgccactttctgtaatatctgtgtgtcagtcaggaatgcttttggctgcaagaaaaccccactgacagtcttttaaaacaaataaggaagtctaaaaggagtcagatgctggccttggttcaatacaatgttagaggcagcatctcagtgcttctctaatggtcacaaaatgactacagtaactccttccctcacatccacttccagttcaagaagcagaatgagagacagcaatagccaccctgtttcttcatcaagaaagcaaagatatcttagaagtccccactgtccttcatttacttctcatgggctagaattatctcagtggccaccccaagtgcaagagaaactagggaaattagtttttagcattcccacactctatgttgaaaatgagtaagagacaataatttggggaataggtgtgggattagtcagccaacagtgtttgctacaccttgsgacaaaacattttacctctcttactctttgattctttcattgagtgaagaattagaataagtaatctttcttcaagaatcaattttctctcatctataactcccatatattcttatttccaaaatggaattaccttctacaccagacagttacttcaagcttttcccctgaatatttcacatttccagaaagcactatattacaaagaagcccttccttttcaagaactctatttgccataatgttctccctaacaagggctgaacagtacgtgcccagattccctgcctctgacctcaccacaccctcttctgtgtggcggtctctcaaattgtttaggacaattatcatgacttctctaaatctccctttttccaggctcaaattccctatgcttcagtagtttttcagataagccccttctgtcccttcacaaccctggtcagccaacaccagacatactctcttcatttacttatgattcattgaacagataatcactgagttcctgccatgtgtcagcactgctctaggagctggtgatatggtgagaaacaaggaagggaaggcccctcctctcatgaggcttacagaggagcaaaggaatcagatgataagataagcgttacacacacacacacacacagaggatcatttcagagagtgattcgtgccaagatgaaaatgacaaagggagataggagagtgacaagggatgtgtgtgtgtgtgtgtgtgtgtgtgtgtgtgtggcagtgcacgtgtgaaactagaagacaagccttcagatgatcagggaggtttctctaagacctgaatggggataattaactagcatggaagaggaagaggttttgaagcaggaggactttgtaagtgaaaggccctgggtagaatgagctagacctgagccaggaaaaaaaagatgctcagagggggaaagtgttggaagatggcctgataatgcacatggggagccccccaccacaagctcatgtaggacaggacaagaactcagattgtattctaaatgacagtatttcaatacccatcttaaaatgtgtctggacaaaacttaacacttagctacacatatagcctgactggagcagtccagtttataacctctccttgtagtgggcactgtatttctatggatgcaagctacagttatatgacttttgtggaagccatgctatccccacagttccactgtgatttcctatatgctctttgatgcacactgctcacatgcatgaatattacttgcacaaagagagagagtaggtggatgtgatgccaggagctattagaatgattcacattacacttccaccatatgaaaaataatgtacagtctaaagcaacactgcatcatatcatcgagcagcttgggaaagcctaaattacatatttgaagttcagtcagtcattgaaattagataatctggatggtcctgaaagtgtctttcttgagagctttcctccaaaagcaaaattgaatggtaaggaaaaaaatgaagtacaacaaaaatgacagcaaaaaacctgaaaaacaaaaaacaaaaaacaaacaaacaaaaaaccccaaaaactgagtaatatcaaccaggcaggagttgaaggagagaagcccaactgttggtagataacttgggatgagccaattaaatattggtcttctctctctcagaggccctaattgcattccctccagcagccacaggcctggggttttccccaggcctgtggcattcagacatcagagctgagaactccagtgaccaccaggctgcattttaatgctaagctgggagcattgatactctccaagacagccttgcaagctccatcttccactgactcaacgttcagtggaacgttcagtgtgtttcatctgctgttcagtcatgcaggcagcagggatcctgagggctctcctccccaatatggtaccaagttttgattcatccttttcctcttccctatcagcaggtattctagaagacagttttatgatgacattcacagctagcattaaaaccagataaaaataaaacaggatgtcaataaagaactaatgatgtgtgtctgtgtaaatgtataataataataaaaagaatagacatctgtttgtcaaggtaccatttaaggccttggggctttaaatgaaactgctttataaatgcaccaacatatgtgactgtttgcctacgtctttcatccatgaaaattgccctgtagacagttgcctttgaggtgaaaagcattctataggcactaaatattatgctagaacacctctaagtgctaatctaactaccttcatgacggaagtttcaggagaacaatttaagggtcatggaaaaaaagtgttaaacgagttggtaatctgacatttcctaaaaactagattcaaaaccgaagggaaagtagagagaggaatcaaaactagcctagtaggatggaagtaggcctccctccttggaggtgtgaaaatgcctggaataatttaggcaagaatgccaactgtcagtgatgaccttggtttaggggcagttatagcatggtggaaacacccctggactggagatccggcatcccttatggggatatgaaagaaatttggcaggtctcttaacctctttgacattcctttcttctttgttaggtaagaagctggtgctggttcagtgtaatttgaactgtgttctgcatgactgtagggttctgcttagtgccacgtggaggtggggatgccttgggtgaagatgaaggaggtgtagtaagcaggtggggctctgcactctttttactctccttcttccagtatcatcagaacaactccacttttttgtctttatacactgagttatttataaaatcctagtttttttaagtgtcaaacaatgcttgattatgaaatgatagcattattctagcattctaactaaagtgtgtaaattataaacaactatctttaatggtcaacaaattgtcatcattactgagcagtgttgttagtaacaccaagtaatacaattaatgaaatccttgaaagtagaacctatcagtgagccatgcatacaactgataagctgtggataatgtatagaagaatgagttcatttggtaattatttgtacttttcaaaatattggtgaactttcatctttaaggagcaatggtgtcctagttattcttgccacaactgcatggaaactctcgaatctgttagtatgtccttgggcacaaaaacagtattttttggaactgctcaaaaattatgtagttttgtagacatttagggaaaaatctcataatttatgttaaacactcagttgtcttggtgttgattgaaagcaaataatacgtgcttaacatcctgctagttgctgagggagattcattcatcattttagaaaatgtttctgggcatcagtcatataataaacactttcccagcacttggcttcacaaaggaacaaaacagacaatgcacattcctgccctagtggagcatatattctagatgacagactgaacacctagacatatatgacaagctctttcttgcaaggagagtccagttaggaaaatgtcaacacctaaaacagttaaaggctaagatagcttctgtggacactaagtgctacatagtagttccagaggaggcagagagttagacctggctagacactggacagggggtagaattagacagatagttcctggcttggtgcctggtacatagtagttgctcaataaatatgtgttgaataaatgaaaaaccaggactgactgaatagacagtttacacatttacataataagtgtgtaatttagggaagtggggttagaatgagcctgggtgaaggaagccttgaatgagagatggagaactgtaaacgataaaggttttgaagttggggaaaggtgagggggaagtgaagtgtaacatggagaagcaaaagtgtgaatattttccaagatgcctcgacgttatgatagatgaacctctgagacagaatgtagggggaagatagaggaaagagccaaagagcctctgagggtgcaaagaagtaaagaaaaaccaggatgtatgatgagaattttattatggagctatccagtgtggatgtgacttctcttccccatatcgacacaaaacacttagcaaaacatttctctttctctctctcatgctctcctgttctttctccctctatctctatctccttttgctctatctctagatatctattagacagatgatagatagacagatacatagatagataggtagatagatagataggtagatagatgatagatagatagatagatagatagatagatagatagatacatcttggaagtggtaagacagaaaaagtagtgagtatagcctcaaaatggctgcagggcaaggtaagaagctgagctcagccttcaatccaatccctgtttacactctgcctatttatttgtttataatatactctgactccccatcgacatatttacattcttggtagaagagattatttttgatatctctttgtatttatttcttagcaccaagataattttaaccactattttattattgtaaattctattgtttttactccaaagaaatacatatttgttgaagaaaaattagagatacagataagttaggaaaataataatatcagaaaacagggccatcatttaaaacatggttacataaataataaagtactgtgctaagtattgtaatgatgctgatgcttttgtaataatgatactgatggtgaagatggtgatggtgatgatgatgacaatgatgaacacatacctcccactgattatgtgtaaggcactgttctaaacctttgtctaaattaatgcatgaagtcttcacaacagcctcaatagatgttattcttcctccctcctatttattttattttagcatattttatagatgaggtatctgaaacagagataagcaacctggcctgagtcatacaacacaaagtgatggaggtaggaaatgacccagacggtcaggctccagttttttgggcactaccaaattatattaataatacaactctgtagcagcctgctttcgagttatggaatagtttctagaataagtcacacacatagatttcgagcccaggaccatctactctgagcagaagctcctacctaaccttgactataaactgactctaccagataatcacacttggcctttctgtaagtgataagcaacttgcctctgtgggcacctaccctgagaaaggtagtcaccctgctccatgctctgtttcaagtacatttattattatttatgaattacttattaacataaatttattattatttacgtattatccaacttattaagtgatgtatatgtatgcaggtgtgtatgattatgaaatacaagatgaaagaactgtaagaaaatagctttgaaaaaattagtaatgactgggccatagcccagtgataaggcatgttcacatataccatttcctttcatgatggtaacagcccagcaaggtaactgtcatcagggctgtcatgtattctagtactgtttgtgtactgaataaaggcatttgcctgagggatgatagggctcaaatccaggctgcactcctcttgatgatctatgaacccaagaagatgagtctacctggagggaaaggcttttccaatatgcacaaagttccacagaagctagagttgtcttgggaatgattatctccattttgtaaataaggaaattaaagatcagaaagattgagtaatttctcaagaatatgtatccagcaaataacaaatcaaggactcaaacctaggccaatatggctctcacttcctttctccaaaatcactgctatgtctttcaactaaattgcattgctctgttcactggtacaaagcttgttgcaccatttaaaattcaaggactatctgattgtgtattatatttttagatcctttcctgaaagcaggttttaatggggagggagaaagtagcaactggaagagagttttgagatggtagatggtaaaatgtgcaagcaaattcccaaaaaatctggggacacagacttcactgccttcagaataattgaaaggagaacccttcaagtatgaagcttcagctgaaatttcaacgtggtttatttacctaatatgctgttcattaattacaagctattagtgactattagcctatgaaattgtatttacagttcagaaatgtatttgattttcacaagccttactggggaacaatgctcagtcaacactttcttcgcctaaagagtacgatcaaagagcatgaagcgtagtaaatgtttagcctttgaatttggagtttacaaaggataattatccacgggttggtgaattcatgttcctctctactccacacagcctctggtttgcatttacagttttgcacaatcagatgtaaaattaaaatataatcattccattttaaatggttccctgtacaattatctcattttaaatcttttgctaatgtggttattctaatgcaactatgatcattattttatgtatgtaaagatgtcaatactgtccagctgatgatattatctaatagtatgtagcaaagcatgttcccttcctacagtgcctcactctttcgatgggtaagatgggaggtgggagtggggggagcatggcattagctgtggataataaagcaaagtaagtacaataggtgttcaataaagtcatcatttttggtacttacgatgtagttttcttgttcctttggttccttttgcagtgggtgtatttgcttagacagagagaagtggcagagggagactgcatttgtatttggttatttcagagaaatgcaacttggtattatgagcctttaattctgtagggcagtctccagatcattttgatgctgaactttgtcataaaaaactattgatttttttcttccaattataaacatttgctggtttcttgtcagttaataactgacataacattatttcagacctttcacttagggctctgttgtgtgtttctcttgatcaaaattattgccttagcatatcaactgaatacacaagagaaaaatcaagttatctatgtttatcatatgcatttttgaatacctatatgtgatgcttgagcatagtggttttwataatcctgtaagcgatttttcaggagaccagatctgacctcctctctcacacccctttcacactgcctgcaacacaccacacataccacacacatcaccaccctgaccgaccaatggaatctgagccaactataaatctcaaacttgttgatattggataatgcctggaggagaaacacggctaccgttcagtaattccagaaagaatttcttctttaaactcagtaaacccaatggcttctcagaaagttctttctgagttttcttatttgaaatttgaaaattatttgaaattgacttaactgacatcacctgttcccctctggatctcccagtgatttactgttgactctttcaaatccactcatctcagggctgggggactgagtcacagtctgctttttcctccattgtcatttccaaatttttcttccctctccttgctgggggctggtgctaagttgaccccatttttccctccttgtgctgtcactcactgcctttccagaatcttctgcatcaggtcagtcactctttccaacttaattccatatgtcaacccattcatcaccggagccacgtggtttccttcacacaaattgtcttctctgcaccacagatgccagtacactctggcccttgccatctgtccttaagatgcaacaccggtctgcttccaaaatccctagttcagacagcctgccttccagttgccacatcctgtttgtttcccagtttaactatgtcactgccactgctgcttctacttgtcagaccttcactgacctctccatttcccccatccctccatttcatccttacgttccttccggcccccatctctgcttcaaygaatgaacccgttttcatctgtttttccatgttgggattctagtcagatttccttgaaattaaagctttttctagtataaacactcagcctgtctctctcactttaaaagtgaagacatagacacacagagaagtgagatgatctttgtccaatattgattagtggtggaagtcccttgatagccaatccatatttctttcacagtaatagaaagtaccaaactttaaaaatgagattagaagttgcctttacataaatgtttaggcttttgakatctcagggctattttgtaatactctaattttaggaatcattgttacaatgtttcaaatctactgacttacacatatatatcctacatatattgtctaaacatattctgtagaagcaatggggattcatgattatgaaaaaagtggccattgctggtttaggcagtgtgtaaatgttgctactgacatcctaatgtgattttaattcttgcagtctggtgtcataaaatagctttcaaaaaagagcattttgatcacgactcattttccaatttctctcctccatgatcccaacatcttcctaagaaatccactctgtacctgagtttccacatggaacttaggacaatgatgttagtgaattagaggtctggcagaatcaaacgaaagtaatcctcaccaagtcactaaaccacactactttgagtctatgcaagttcaggaatttctatttgagcaaaagccacaaatggccagagcggacctcaggctttgtgcttgaactgcctaatgccatttgatttttcgatcccgcacttttccttgccagaccaatggtcttttctagcagtaaaatttcagaataggtaggctaccatcactctttgggttaccccagtgtttacttaagttgaaattcaaatagatatgtatttctatatgaatggctgccattctgctatgcccatgtttctgtttctcactcatctctggcttgtctcgtagagccctttctggtgctgacttatgttgctgagtcaaaggctttcatagtcaaagctcttctttttatctgatatgttttgcagtttgctgtactgcgtcaactctactgggatcatatttctcttgagactaactactaggcaacctgtgccttcttcctgcactgcattttgcaagtgcttcttaggatttcactttcatttaaaggcagtagatagctcagagaatgtggaacagtaactagaacagatccaagagctgtagaatcaaagaagagttaactactgtctctgaaacttagaatgtaaccaaagtcaagctatgcaacctcactaagcctgttttcccatatttaaaagtggattgtaatgtttatgagtctaccactacatyagattggtgcagtgattacaggagacagcgcatgtaaaactcctggcatggagcctgatgcatttgaaacatttactacaaactaccattgttgttatcattattaaaaataacccattctttcaaagaatcttgttcttggccaccaagcttggaagtcagtgatattgttcatcttatttgcccggttttttttttttttttttttttttgagaataatttatgacctctgtggcagcaagtctggcctcatcttgaccattctatctgcatgtactaacttttcaattttaatggccctgtgagctttcctcccataagccaaaaagtgctgtttttctattctagtgttttcttgtcaggcaacaataatttctaaataacatgcctcttctaaaccaatctcttaaaaaatagattgtttttgtttctgaccctttctcattccatttcagaaactattttttctccttctttaagcaggttacaaacccttatatttttaatatgctgaggcttgtagtcaaaccattactgtcccaaaagaaaagcccttttagcacatttacagcttcttgctatctgtgccctaactaaattgtgctacagggatagtttcttaaccattaaaatgataggtgaacacaattttattttgaaggattactaagctatttttaaaatttctatagttagaaaagaaaaactgtttaactgaaacttgaacccaattaaaataacaattctcatggctctccgttttgcaatactttcctattcataaaataagaatgtgcactttacctttttgacccatatatttgatgtttttcaattctctacacgttctttatctctctgtcagtgtggaatattctgatttgttaattaatacccaaagcagcagttggctattaatgaaatgtacagaaaggtatttggtaaaggctacatgaagatgatgatgacaataacaaagatatctgattgaaagtaatctttacctgttaatcttcccttaatgtctccgactacaatggcagacgttgctttcttggatgatgactgaaagattagtttggaatgaataaatttatttttccatggttgattcatagatttttttagaaattactaattttgaaaattaaaccttctttttcagccttttgagttttatgtttctatagtttaggcttaaaaataatgtagacattagaaaaaaactcaagcggtattaatccttatatccctaatggtaaagagcgaggcagctaacaaatgaggtgctggaacactagcaagggagcctgtctctcttctggtccttttgttgtccaattacaggtgaaaagatgctatctgtcagcttgtcattaactcaaatacacaaaggcctgtcagttctcttatgcacttgccaatgtgagcacatcccatattgatgtttctactaaggcttgctgtacttgtaaacagtgtacttgtctggtaactaaatagggacaagcatgcagtaacagtgtgacactgagcatttcagttatatgtcttcttacctcagaattttaagaagaaacaatgctaaaggagatttttttttaaattaaaaacaaaaactacctttccagggtattttaaagaaagaaggtgaattccaattgcacatacatccggtatgtgtgacgccaggtttatccatggcctctctcgccctactgctttttaagtaatatgggaaatgcaaataaacaaataaaaacctacttaaatagactagtaaaaaattgagcaataagggatcattgtataattagattagaatagtgattttgcaaagggttttaaaatgccttaacataggcactgacaaaatgtttgtaggtcttactaatgaatttttatgttttttcaatggaatgtgcattagaatgaggccattagttctttgtggttaaccaaaatctcaagatttcttgtaatgagagtaacttttctttctgggatccctgacaaaccggaagagagtgctgctgaaatgtgggaaaaacagctgtgttataacaggagctgccarccccccacacagctggctgcagagataattaattgtgaagagagtaaggaagtaattcacataattgtgtaaatgttaagtaatttacataattgggtatatatacaaatggatttcttccctaagctatttttttaaatacagaaaaatctaatctacaagcagttgattattaaggaaccaatttttaaataaaccaaaaaaagtatctattctaatgtgtgctatttttcacaaaaaaagtgttttcctgtgactgtatcctgcatcccttgttacaagtgtgtgtgcatgtgtttgtgtgtgtgtgtgtgtgtgtgtgtagataagtatatgatgtctttctgggactatatgcttaatctcactacaattacttttgggttattccatcagcaacacaagtaaatctctctagatactatttatctcaggagtgacaaatatgtgttaagaatgacttctattacccctgcattataagtttattttttccagtatttttttcccctttgatttgagacttagcctaggcatcattcccaaagaagtgctccagacagccgccatgaatgaatcagaactggcccttggaaggaggcctacctgccggtcctctaatggacataacttacttttacctcacagtgttactcagtgctttatctactagggctcatgagatgcagtgttcatactgttttgtttccagaatccctgggtgtgttttattccctcagttgtatataacaggacgcacaatggggtcaggccaatattttttggctcttaaaaggactcttgctgaggtttgccagtacctgctgatctgcagctcccccagcttcataagcagtgataggagtactgagtcagccccaaattaaagaaccatgcatagaacaatgccctgcagcagactcgtaggacaaatctgaaagagcatccccagactcttgaggcatagatacctcctgaaaataagggtctgccttctataggtcattactttggaacatttaataaagcattaccaaaaagaaaaaatacatgtattttataccctcacatttctttttagtcatctttagttttgcttacagtctgattaccccctcactcccaaatccttagctccttacaaaaaggaaaaaaatattttctataacatatatctggaagttttaattttagatttatagtttcacattttcaagccagtatttttctagttccattttgctctatttctagatcattttttctctctcttttctcttaggttttgaaattgctttagatctttaaaaagccattcaccagatttttttttaacttggcctcaaatcatttttactaagtattttatttgagccatcttttttcttttttccatttgttttgttacttttctctccaccgaccctctgctatcaggcaagcatttatattttctattaagtatatagtttctcctaatctctataaacaattatgtgaaaataataagttaacaaatacaatatgacctcaattaactgtcttaatacaagtggaaatggcagagataattccaagagccaattttttattttaatgtgtttttcatatgtacattttaatgggagcttttatgatattatttttcagccacactatttcaaagaaaacaatggagggcattttgtggagatcaaattctggttgagctgtttggacacccagctgcccatcctttctctaatgctcctcccgagcacccagcatcatctctcagaattagacctgaactagccctgacctgaactgattcttctgtccctggtcttctctttctaaattatattttcttgatgagtattttctgtttctaaattagcatcctccttctgggcagtaaaattgagtgagtattagacaaaattgtgaaacgtgtaaacagacattgaatggtttaattaatcagcaagatgtgcagttgaacttgaaagtaaagcatgtgcataataatcctgaagatgattgaagattaattttagtatctgtgatcagataaagacacatttcaatgatgcaacaatgtttaacacttgcaggctactgcaacagaatacttctttagggtcctgaaatcattcttgctttccacaaacttagttgagtgcattaagagattctggctcatagactacttctgcttgttgactcatgccttatccttttcacaggatcactatctagctttaattaattaagtcaggctaatatttaaccagtcttaactactattgctcaccttgcttttctatctcgtgttcattgggcctgtcttagcaaaaaatgactatagaggcaatcaaaattttttatctgatcataagttcaaagttcaagtcagataatttaccttaaatctggattgaaaattaatcatatccccaaagttttggcttgagtaacagtctagatgtttttgtgtatttccttagattcaattctatcaatcctctcctgtgacayctgtaacattcctatagacgattcctgttcaatggtaactcttcacagtgtgtcaggaagagctcttagagatactattagtcagattattcaaataatttctttattgtatattcctatttggcaccaatttgatagtagcatttccttgtgtggatagtttccctttatctattaaaaaagcagtcttttctgactattttctattttcccagcctctactcccttgcttggaattgactgctgtgttaagagctatacaggtttacagaaactgatctttatgattcccaaaacacttggcttttgtgtgaaattgcaaaaattgaaatagcctctttggtacttggtacttattcaaaatgttctcatgtgtcttttggctgcattgcatgttgtgcacaggtaccctagaacttaaagtataataaaaaaaaaaagttctcgattttccaacactgatgatagttccgactttgcagattagcaagaacatgaataagattaattttgcataaatgtttttcatgtgcacaacttggagatcttcagaagaaagaagcaacgcgaatctcatacatataatctttccgtagcttctactgtaaattttggtgaagtgaaacaataaaatttgtataatgtagaaattaagggctgatgactgaatggtcattcactttaaattcatgtatttattgaaattattactcgagttcttggctagggatatagaggtgaacaaggcccaaacttgaaggagtgagtattgcactggagagagaatcatgcttacaaaatattagcaggcccatgttccttagtctctgaatttgtaacagaaaaacacaaattctttccaccctgagtcactcctatccatgaggaattgattgatttaactggcaagtggcaagaatttgacatcccttggttcaagccttccagtggggtaaaggtgtgcttagaagccatgagcacaggggatcttgttctctcatttcttattcccatcaccagctttccccagtagactggatgggtgagaaggaaggctcaattaattgcagaacaattgagtaagtgtcctccatgagcagtttcctcccagctgctgattctcaggaccaagatgaggggaataattagaaagcctgatcctggctgcaggtctctgccctgatgcagtggttgttaaagtaccagttaagtacagctcaagttgttcaactcagaaggcacaataagctttagcctaatactacagttctatagctttatggatggatacagggcaacggacacagcaggtgaagcatcttaatgtcatcagatgagacagaacccacccaggtacacagcttccattgcttcctcacagagtgtgtgcggccaccatggacaagaactaaacacctgggggtcactttaccacagagactctgtcctcagtttccaactagtctttcaaaactgttctggtttagatgcccaggtctctatgctaccctgccagctccccaccccatgtgcagtgccaccaccaacaaggcagacatggcatgctgtattcttcttaactctgtagcttctaaactatgagtgctatgagaaggcaactctgagatggttcttcagcgtaggcctgggttagctcagacctgatgctaaccctttacttacaatgtccaatccagatttttcaacaataaagatatttttatttttattggatgcttttgtatgcttaacattttatctccaatgtatcacatgtgaaaggctctgtggagtcagttacactcctttctctctggggtaaggacagttgagatacattgattgcacccaattgacacgcagagaccagtagacatcagacttttttcatcttactaatgaggtaaattaattatgtcttcccgtgaagaggtctaaagtgatgctctagtgctattaccaatccaagagtggtatcagaagtctcctttcagaaattgagacaaagaaagaggacacctctattttaagaaaacaggtataatgctgtaatatatcactatccacagtgcagtgggatcccaagtgaaggtgtgtccaagtgtgcctggaggagatctgcttctcattgtagtgagaatttgagctgggatgataaggctctagtgaggtgagcagagagagggcattgcatgtaagggctcagtggatgccagaggggagctgggcaatatccaggagattgtgaagcatacaaaagactgggactttcccgccaaattcatacttacattattaaataagtacttgtcgtcatccaagttaattaattgatttatttagatttttgaaagcctttgaaattgtatataaagatagatactcaatctttacttaagaattccattgtgatctcaaaattctttgaactattctcttactcaacaaatatttattgaatggccactgtgtgtcaggcactagtctttctataaacataagggatgctgcagtgaacaagaccggaaaggtccctgctcacagaagggttacattctagagcttcactagcagtacagtggtacagtaaccaccagcatgtgtcgtgatggagcacttgaaacgtggccagttccagtggacatgtactagaagagcgacgttcacattggatttcaaggactttgtatatatatacccaatgtcaaaatatctcattaatataatttttaatattgccattacacatcaaagtgatcagttcgttgcattgtccttacgtaaaatacaatacacaactaaaatgtgttttgtttcttttacttgtggtctctataaataattacataggtggtcttgcctttctgctggacagtgctgctcttgaaagaagagtcaaaaaatgaactacttgacaaataaatgaacaagatgttttcccacagtgagaactgctatgaagacagtaaaactgggtgatgcaatggagagcgacagagactacgttaaatcaaccagccaaaggaggcttttctgaaatgcaattttgctgacatgaggatgataggcaggagccagccagatgaatttctgtgggaagagcagcattctagatagaaaaatagcaaaggtcccaaagaatggcttgttatcttaaaaaaaaaatggaagggttaagtagtaataagtctgaaggagagttgtatgagaggaaatcagaaaagtaggcagggctcaaggaacttgcagacttggaggtaagatgggatgtttttgaagtgcagccagaaactacagaagagttcctagcagaatgacaaaactgatttacatttttagaaagacctctctatctgtttcatgaggtaggagcagaaaaatgtgtaaagactgttctagtgttgaatcgcagacaagggttccagaggctgcttaaggctttcaaatggagcctctgggggaaaggagaggctgccaagctggtcgactcctctcttggctaaagctttgctgggcaagctctgtccttccctccattcttgcattctgcaggcagttggagataaactaaaagcatcactgttaatgttgtttttcaaagaatggaaaaaaaaagaatgcattataagcaggaaatcatgaaatgtgggggaaattgctttattggcccttggctggagtctacaaattggagcattatacaggaaggcattaaacagggggcgaaagggacatgagtttgattttattagccttaggtgagagatgaaactctttttaaagctccaagaacccctaggacctgagttgagaagagacacagcacaaagcagtacaaatctgctgaagcttcagataatcttgaaaagagtagaagacactgcagctctatagctagagaaaatcaagcctgctttgttaaaaacactgatttgtaaggatggctgtccattctgtaaaccagggtataactcttttacgtgacaagaccattaggaaaaatggcaattagatgagccaggatttcagcagtcagtctagctgaggaaagcgttttccatccctactgcttaccggccattttgggggaccatgatgactgtatgagacagccttagtttgagacagttgctggaacttgactgtcatatttgaagctgccaagcagtcaattgacaatgagttatcaggggctgcattgttttaggccacgtataaagctggattggacaggtatgcagagtggcttctactcacagctgggcagctgtggtttcagcagtccttgtaaaatgccttacttgggagaagagtcttcaaattagagtggtaaagatctatttagtagcaacattttaaacatcacatttgaacaagtattaaatatgccaaagttcagcatttcattcatggtctactctttccctctctactcactttttctaaaagctaagatattacattggtttaaaaaaggggaagttacataaaatataaataaaatgaaatataacaaattctagtataataaaaattctccttaaaaatcattacctccaatacaaagtgagattaatctatctaccttcactgtgaaaagtatatagaaaacaaaatttaaaaattacaatagttctactcatccaagatcataaaagcatgtttgtttcaatgaagagaattgtctgcatttacttggatgttcataaaactgggtttccctatctctaattctttgagtataaagtttaattatatatgccctttctaataacatataaataacaaaaagaaagtaaaatccatattatatcatatataaatagaccaatttttcgtcagtatcagattaaataaacagtagcctgtcattccaaaacacatgcacacacaaatcattatatacaatttgtgggaaacwtttaaaatttatttataacgattgggaatataagaaatatgcaaagacatagggcaaatccaaaccaaaacaattcagcagtaacaatattaagattagacaaggggaaatgtcaagtttaaacaccaaaaaaaggtaaaatcagtggtgttagggcgttagctggtaccagcttgtaagagcctatggttaacatatcttcctaactccatgttcaataacatcatattgaaattggccacagtgtgattatttacaccgtagaaattggaaatgatacaaatcagggctttcttcctcccctcctctagagccaattgctaaccatttactagaacaccatgggatagaaatgatgaagttaaaattatttgaaatgcacatgtgctcaacaatatagcaactaaaactataagacaaaaactrttagaaatgtaaggaaactttatttaaaacacatgattatactggcatattttagtttatttcttcagaattgtacacatccaaaaactattaagtaacaatataaataaattagatgtaatccataaacttagtaaatgaaatagacagtctttattyattcaatgtaagtgtgtaaatggatgtctccaccttaaaaatgagatattttaaataagccataattgattcaaaatggagttaccttttttggcatcactaacttagcgrgtaatcttgtaatcttcctcttaaaatttgtttttgtgaaatcctaattttctatttctttttcttttgttgttgttgttgttgttgttgttgttgttgttgttgctgttgagacagaatcttgctctgtcactgaggctggagtgcagtggcacgatcaatgctcactgcaatctccgcctcctgggttcaagtgattctcctgcctcagcctcccaagtagctgggactacaggtgcccgccaccactcccagctagtttttgttatttttagtggagatggggtttcaccatgttggccaggattgtctcaaactcctgatctcaagtgatctgcccacctcggcctcccaaagtgctgggattacaggtgtgagccaatgtgcctggccctaattttcatttattatacttcccttactatagattcaatacaagggaatgaaagcttagacgttcttggcatattttatgaactcctataaaccccaaccaggttgtgagtagttatcgcttactgagaccttaaacacaaacaatattttaatgttcatttattatcctgaataagatacatagatatatattgggagttgagcgctaccatgtcaagaggagcaagcccatagaatgatttttctttcatttttttgcaaaacaactgcaatgtcccattaagacttttcctgcatgttcgtgtcagatgaaggaaagtattttccactgataccccaggttgttagctagtcccacgactgctcttcaagaaacacaagagacctatctgaatgtgggtaaaaggatttcatgttgctttttacttagaaacccagattgtttgtaataagctctgtctgattccttcaacacttagcatccaggcagttttcttcctctaaacttcaaaaaataggagagaattgtaaggaaaatgataaaagcatctgaagttcagcaaaagtgagcctcatctgagctgacttgtcctgatttggggatagcctgaggagagtgtgttcacgcaccttgcagagtagcccttagcagccacttgaataaaaacgaatgaaaagataaacaacaggagtgggcagaagttcgaaatggaggatgtgtgtgaagaaataataacattgtcttgaagattttagaaaatgggagaggcaagaaaaagaaacatagagatgaatcctggaaaaggtatttaaatcttggttgattgttcataaagcccccacccatagcatcttcatcatccctgtgggatgcaaatattgttgttttcatcttacacacacggacattgtgtttctgacaggccaaggggctgttcaaggtcaaatgactgttgaaggcaaaaccactagtatgcagcagtagcagaaaatgaatgcatggcttctgatgataaatcctatggtcttttcaaaacgcctctgttgtctctagggaaattgcctcaaattagaaatcaacacattctactgcagttctaatttgcacacgcttgcctgaaaactttctaatttctggttcttttttaccacctcctctcccacttaatttcatagctacagaggggaaagatagctactgtccaaatagtcttgctaaaggacctcattttcaaaattctttttcccccttcaagtcttcatttgactcacggtgtaatcacattagtgaggaagattttgtacagtcatacctagtgccaaatatcaagttttcctccaaaaagcaaaataaaatgatgggcagaccacctgctttccataaaattgtaccaaaatcaaggaggacaactctacgttatcacgtagaaataacatcagcatttatgagtaataggtctgtttgatgggcaatgctgtggtgtgtaaaattctgatgacaacatgttgaaaaaaatgtctggaagaatgggagaaaaaaagtgaaagtctatggaaagtagtagatttggagtccttttgaagaaaacatgcaagaagctgccagataactgctagataagcagctattgaccatttatgaactcagttttaccaggcgttgagaaggcgagaatactcaaaataaaacctgcatagattccacccttaggaaacttacagtctggcagattcaaaacaatttcacttcactttaagtaattgtaaaattgcctccataaaagcatagcctggatgaaaacatttttcaatattatttactcattttaatgcactcaaataaactttataccaagtaacttctttaaagatctaccaatataaggcacgtatagatcaaagtagacaatgtcagcccatataatccccttctccaggtccattttgattgcttgtgtcaacattggagaccacagtaaattactaatggtccttaaaattccccccctatttatctctttcttttcaatttttctccttcactcctgctactctatttcttgtgttttttttttatctactttttttttttgctcttccccagggaaactagaggaaaattcttcatcctgataagagtttttggcaccagaaaggatattttacctgtagtctgacctacatggagtgagggagcctgaacatgtttccatgagtgttctagttcaatgggcagaaagatccatcaggagaaagcctttgtcactgatggctttgaaattgttcaaatgactttgcagttcacaacacgtgagcttaatcattggtttggctcttctgaggagctgagggagacaaagaagcaaagttattttcccagaggtagtgaggcccaagatgctcagaaaagatttaattgaaagatgccattgctgaaatttcttttataatgttctgcctgtggctttccaatagtaatagtagtagcagttgttgtaataatagagatagtagttgtattgatagcaataataatagctactatttattgagcactgactgtgtttcaggcatgggtccatgcactttacatatattaactcatttaaacctcccaacaacctaacaaggtaaagatgattattatcccatttcacaactgagcaaactgggacatgagatttaaggaacgtgcccaagctcacacagctaggcgatcaccaattatacatttcctctctgcaagagaacagtctatttttcaaaaacatgctgataaaacagcaatcccatttgcttctaaggacaaaccctgccatgcctgagtgttgccattcttaaactccaggccagggcttgcctttggatgcatgtgagcttcactgggctctctgctcaatgtccctcctcagagtgtctccctaaccacctctcttgatctctctccacccctttattccacttgggttttcttcagcacacttagggctacctgacagtgttagcaaggctacaaagcaaaacaccagatggggtggcttaaataacaatcatttattttctcacagttctggaggctggaagcttgagatcagtgtgccagcttggttcagtgctggttatgggtctcttcttggcctgcagacacagacaccttttcactatgtcctcacatggcctttctgtgtgtgtgggggggggggggtgtgggtgtgtgcgcgcgcgcgcgtgcctgcatgcctgtgtagggagaaagagaaagctctttgcctcttcttataaggtcagattaggaccctacccttatgaccacatttaaacttatttactgactaaaagccctatcttcagatatagtgacattgagagttcaacatatgaacatatgagctgataggaatatatgaattgatgggaacatatcaacacttcaacatatgaattggggtgagggacgcaatacagtccatagcggtgacccagcatatatttaataggtcattaatgtgtttactatgtgtctttcccactcctcccggtattagtaatctaaataccagtaaggatttgaggttcttctttgttgtattcctaatacctaagacactgtcccacacatggtagatgttcaatacatatttgttggataaataaaaaatacagagctccctcttctcccctacatgttggaaaatgtgtgtgatctaaatgagggagagggagaaccatctcatctaatcttccaaacttcctgagccacctttagctactgagcacattcacgtttccgtcagctgggaatttaggtgccctgcctatcatcctctggagcccatcccaggagggggcagaaggaggtggagcagcacactagtgttcccagagtggggagagcagatggagaggagttcatgggaacgatgatttacccctgctcacttacccctgtgagaggacactgccctccacgaatcaatgctggctcctcctccaggaaccaggcttctgcatctcacttgccatgctgtggatctaggaacaaatttgcatttggaaattcattttaaagtgtgcatgctgaggttctggtgacatgcagggtaacttctcccacccacgatatctcttgactcaggccttcatgtaggaggggaggagtgtttggcagcaaaactgggtatttcttaggaaggaaatccttctaagctttatggaaatcctagggtgttgtccctacctttctgagtgtggagcagactatctgtgtacatagcggtagtgaggggtgtaatattggagaatggcttaggtaacagccaaaatatacattgtatatccccaaaaagacgaccaaagactcacagggccatgctgctatcattagatataataggcawagcctttcattgatatgtaaatgttagtatttttggtaagtgccttattttatcttctggataatataagatcaaagtaccatgagggcaggatccttctctcattcattttttttcccaagagcatagcacaaagtaggaagtacttgttgagtgaatgaatgatcctaaatatgaaaggatggcattttatcgccattttccagatgagaaaaaaacgagggagcttatcaggtttatatatagtgagtgacaaacttcagaattaaaccaaaatctagtgattcctataacttacaggttattaaggagtccacctgaatgtaagtccaacaagacaggtgtttattttgtttacatacattccaagtacctaagacaatgcctaacatatataaaatacttcataaacatcttcatgtgtgaatagaattttcaaagttcatctcaatatatgcctcatgtgacacttccaacccttcactgccaggtctttcagtctttatttgaataggttcagtaagaaagaattcactcgtgctttagatatgtatggcttttccacattgttgtcagttctaaatcccgaaagttatttttgtatgcttggaatacttcacaatattcacaatttttacaataaaataatttcaggtcttcttgatgaaaaatgtcgatcaggacagggctgaggataatcacaaggcttgaaattaaagaagtctccttaggctgaaatgaatttctagttgtaaaaccaaatatgaatctatgtatttgtgttcctcagaccacttttccagcaggtccttggctgtattttgtatgcatttgtgaaatgctttgttgaaattcagtttcagccaggtctgtagcattctcctggcccctggtctgatagttgtaccaggaacactagctaacaattgcatggcactagtctcagctggatttgttctaactcttttatatgtattaactcaatccctacaaccaccccatttcattactatgcccacttgagaactraaaacactgaggaagagcgaagttaagtaacttgcagaggtctcagagctaggaagtaagacagccaactcggaacccagcagactagctctggagcctacccacctaccctccacaccgtacctgtggtccatcctcaccaaccaggcctgctgccctgagcataacttcaccctcttgcgttctaaaactatctgctgattaagtgagttctgaaatgttttcagggaccaatactaaaatcaactatgaaatagtttcagagattgacctttcctccttttggaatggataagattttcccaaccgaggtctcccatcagctctcctgttcccctggactgtggcacataggagggccagggacttgcgcctattatttcatttcttttgttatccttcatttctagatctcttctctaccacaattatctctcatgttgacagtttccccacagatgggatgtctatttccttgataatacagcattattatgctaaaatctctcatttgtgttattagccagactctgtgcaaaaacgtgtgtatatctgagactctgtgctgttcttagccaccttcttggtcccttctcatgtaaattactagggcacttcttcaatattattattatcatgcccccttaccaccaccacaaaatcttccatcataacccatttttttttcctcctccttaccacattttcagctttgaactcttataatcagatcaggaattacatttctgaacaaatgcaggctttgcagcattgtgaagtgcagctggtccccagcagagagccctaagcccctgcctgaagccaaacccccttttgtggcgagaggtctggattttatttgttgtttttatctttggtgaactgtcaactggaagcagagatgcgaacaccagttatgtcctcccctgcaaggttcatgaccaatactttatagtttctggatatgcttcctaggtttcttctgttggtgtcatttgcctgcatgtgactcactggcaggtggtgatttcatcatattctagacatgtgtcttaggaagctggcccctatcctggctggctggacacatatcgaagttccttagatctaccattgtcactttcatatccattgttaaatactatagatagcatgcaggggtcagccaaattgttctgtaaaaggctcaagcataaatattttaagttttgtgggacagacagtctctgtcgcaactacttgactgatgcagcatgcaagcagccacagacaataagtaaacaaatgggaatggttgtgtcccaataaagctttatttataaaaactgtctttttttataaataaaggagcccatcgtttgccgccccctagtgccaggaaggaacaaggggaaaataaggaagagacccagaggaaaaaaagtgtcaccaaccatatctctaactcatatttatttacttatttttctaagcgcaatcgctaaattatctcgtcttcctaaggcgtatgaatctcttacattaacttagggacagaatatagagttttatgttatcttctgtgagttctttttccattctgtcatgtttcagactttcagaggtaatttttaagtatttcagctgtgccttagatacattaagggacctatagtgcctccctgaggccaagatgatggttgcaatcataaataggttatttctgagttgagactggtaagaacagattatcctgcccagacagtgatgtgccaagcattggcaactttgaaaaatttgcaatttgattttataggagagtttccttaacaggcctgagtttttttcccattgcttttgtgaatacagtattttcccctgctagactcttagtcaaatgttcttgccattataagaaaaaaggaaaactgaaaaacttgaaaataattttattggcttaggaattattttcatgtttgtctgctaatggcaaataaatctaccttattgaatcatacggattttaattccccgggggaaaggtaaccaatgacaggcatatgtgtgtgtgtgtgtgtgtgtgtgtgtgtgtacaagtgtatgcttgtgaaaattgaacagcaaaaagaaattaggtggagaggaaaacattaaagctggtactggtgggtaatcattatatatagtatatatacacatatgccttctccagttttatggaggcagtcagtgcctcaaagacgtgtaataaagagacagcaacaattattggtggcattcatgtaggagaggcttgagccaatgtaaacttgacttggttagtaatctttgccaaaactccctgattgtygtaagggagttgtgaaccattaggtttgcttaaccagaacagcaagtaagcatccaaacagattgtccttggaccataagcaaatgcccagaaaatagccccctgcataggakattaagtacttagaaacaaatgagaaaaaatattacagcaagtcttccaggtatagaagggataaacaaccctattggtatcagaatttaggaatattattatgtctcccactttaaatgaaatacagcagcctgacttggcaaaatttggggaacggttccccttctttgcagccaggttcggtgcttgccctctggcatcccttcaattgtgtatattactggcagagacagctgtttgagctgctaataagattgcaaaataatatcagcttgtgcttcaggttgaagataagagataacattgcattggctgtaggaatggctttcttataaactggatttagttttatctcacttgtctcacttgttacttttttatttatttacttttttttttttgagatggagtctcactttgtcacctgggctggagtacagtgacacgatcttggctcactgcaacgtccgcctcccaggttcaagccattctcctgcctcagcctcccaagtagctgggattacaggcatgcgccaccacgcctggctaatttctgtatttttagtagagacagggtttcaccatgttggccaggctggtctcaaactcctgacctcaggtgatccgtctgcctcggcctcccaaagtgctgggatttcagattacaggtgccatgacgcctggccccacttgatacatttgagggtctcataaggtcttgaaattgagcctgtgaatttataaacagggctacaaccatcctgcagatgcaactttttggcatgccagaatcagtggcacctgaagagcatctccttgaaagcggtagtagataaaaggagatgcctttcaggtttcagacgtggacctcagattcacctccaagactagagttatcacagtgcacaggatcatccaagaacagacatgcagagggaggaaaggccattgtaaggctcaggagaacatagtagagcctaaaaatgagaacaaaatggtactatcagaaaagatggcagtggttgggacataagagagggtaggttcacaggtttgtgggaccaggactcagtcactttcctcgcgctaggctcaaccctcacgatggggaaagtaatgtacttctgggcttaaaattcttcacagtcaactggtagagatatgagggaatttattgctaagtagtagggaaagtgttttcacaaataacatacaggaaattcccatatcatacaaaggaggttgtattatcaccacgtttttacatatgagaaaatagagtcttagaaaagttatgtaccttgcctaggagcatgtgcctagatagtggcagctccaagattcaaacctaaaactccagagtctgaaactcacacagtttcttctctgttctgaggcttcatgcagctggacaggaggttagcctgagacaagaggaggatcattctcgaaggcagagaggctggggacatgactgctttctggaaacctgagctcatggagagaggctgagagtcaggaaagtaggacatgaaatcatttaatgagagtgaagaccagccaggtcagggagtttgaaaagagagttttgaaatatccattgtagctaatatgggagagcattctttgagagtgattaaaatggcgactgaggacacagctaaagtgagaaagaataaatctgtggcagacttgcatatttttggtatgtgcatctctttccgaaatcaattgaacagaggtgggaaaagtagcttggtggataatgaggtagagtggaaagttgaaaagacagagcttaggagtctttctgattggtctaaaattccccagggaaaatcatgtttctttttatgaatatagtccaggtcttaggtctgtcccacggcacaaagttttcaggacattctggacaaattcacacatttccctggatgtcagtcaattccctttgcctctgtgctatcactttccttctctctgctttctccttgagttacctgtcccagctcttcactccacattctgcagcctccgtttagctcctttatacctttgtccagattcttcctaacttattatactgcctcctcatgtcaacttccatcccatctgcatttgggaaaagaagcccacatgataagtgagtccatctgctaaatgtatgcatcttagagcatttgttcaagatcaataaagatacaaattattttgatttttcagctgttgcccaaatccacaagagtacacaaatgaaaatgcactgatttttaaaaagtacaaatagccattaaagtttgtattgttttattctttaaataagccggaaaaatgggaatacgtaggaacgagggagctagcaaaataggcggggcttctgcgtttcaggtggtctgagactgcagtgaccctgaggctggtggacctggaaggagccagggagagatggtggatcccaggggtgggagcaaatgcatggtccaaggttctgaatggcagagctagaccaaaggactaacctgctaaccttgaccaaggagatggcccagaggttttctatttctactgctccatcttttcattataagttcccagtagaaacgagtcatcatttaaaatatcggtgcagcacttaacacataaggaaaaatcaataacattcatttacttacagtacccagagaagaaataaattcaaatacgtaaaaatgggcatgaaccatyctgttccatatcccactttaggactgtcagcaactgtatacattgctgaacgtcattgctcttgtacataatgaataattttctgtaaccctgtgaaggccgactgatttttacggaaagacagctttgtgttaggcggcccgccttccccacggaatcgggttttcccacgccacgttttgatgtttctgagaagtgtgcgccatctgctggccgctgagaggattgacgagcagccataaggagcaccgtgtttcttgagcatgacttaaccaggcaatggaattacaattatctttgggtttctaaaacataatagacatttcaggattcacgtgacttatgagaagtcgcttaattgcctttcaagcagtatacattttttattcaatatgtgtattattctttgtaataataaacratgcaataaagcaatcgaggggttcccacatgctctctaggcagagatggaccccgggccctagatgaaaggttaatagtttggagtgagcactaactctggtyctctgactctgaatctaagtcaggagtagaatagagctgtacaaagaagactgcttgatggaattgaattttgtcccttcttcaatgggggaaaataaagtacagttttcatcaatagattaatgactaaacttggaccttgatgccaaatccaacttgagctccgcctgcacagtctggagatgtacataagagacacatgctcagcctcttagcacatcgttataatccaggcaggcaatactatatcctaaaattactcctctttgctgaaattgagaaaataggaattacccaggggtaaatttggtacataaatgtaccaaatggtatgatttattctagtactgtcttctttttcttgattttcttctttattgggaaatttgtattttgtagttccttcgacactttaaaaattaaactagagggtaagatttaagttttctcacaactaacaaatgattttgattttattgcccaaagccctttatatctcactttcgatgggtctagtccctttggcttaatttagatgtgatttttccttaataattttgaaaatggtggtgctctataccaactagctagaataggaatcacattgacagtatttaatggatagaagcatctcaaagatctttgcttaatgagggcaaatcattagcaatgtccaactccctatgttagaggcgccaactaaggcacggtacttaaatttaaagcacaactcttcgacttccataaagtacatatattacattatatttttaaattacggggtagtgactcgatatgtcactggaatgttttgaatagtgcccccggcccccctgccaaaaaaaagaatgcaagaacactgtcctaaccaagaaggcctgggagttttaactaattcagcctttcagcctccacttaaaattctggaagacagtagtgttggtgctagctgtccttggctgcaagttgtctttacagaagaacttggggtacattttggtgtgaggccactcttgcaagcagcatttgcaggcattaagagaatgcacacagttcaataagctggggttatattcataatcagtctttgtttaatgctgtaaaaatactaaaggaatggccaaaatctctcggtatctggggaaaagggttctttgaaacttttgatgtgtgagcagaataatggaaacttatctgttccccatgcttttaacacacacacaaacacacacacacacacacacaaacgtcatagatcaagatgtaacaggttggaatggggcctaggcttgggaattttgtgactccccaggtgatctcaatgtactgctggtttattagcaggctttgcccaaacaaatactctttctcacctaccaggagaaatcaaagagctctgggttaaacacttgtatgttaaaaccaaaatggtgggcattgcagagtagaggaattaggagaagaaaatagatattgggtcaaaaattggcctcaggaaccaggaagtaagaatggccaatcttaaaagagaaagttctgttgaagagggagcattatctgaagttggaatgactatggaggacaatgacagctgtcccacaggatgtcactgggctgaggaaaatcagactggaagccacaagcccatgggggctcaggaagcctgtttcctgagcagaacagagctgggtttggcacatgcctagtgttccagtgaaatctgtcatttttctgcttccactttttacaaatgagttattcaacgctactttgttgacacatggactcagcatttaaaaaatgacagtggagataagggtctaaggtagtgataggcaaatgaatgatgggcatccatcatctgaagagcttcttaaaattcagatttcccaaccccaccacagacgtctgtctccgtaggtcttgggtagggctcagagcaggctgcttctgaaattttgaggttgtgaggtaagaatacaggtgggagcctgcataccacttgtctaaatatttaaaagttgtaaatcagcctaatgaactgtgaaggaagctctggcctacttccttgacaacttaagcctatacagagacctggaagatcaagttcaaatgcagaacctgaatgtttcggttctatctgctccctcagtgttaaaggtctgtcctttttccttgacaaatatgctttcataattgtctggaaggccggattccaattcagcaattccaatccctcagtgttgagggaaagggccacccgctctgctcttctcttcccatctggctctgtctggaaccacgaagcacctctgtgtgtgtgtggggacaagccagcccaggtgcctgcgttttggcccagtacctcctaccctcatactacatatgtagccacccccaggcatagggttgtgcacactggtgacatgtctgccctctagaagaagcatgggggaaatgggaccccacaggccctgttagctgatacgggccatgagctcccaggtcacggtctaaaagtacattggtttggggctctgcgtgaccatattccaaggatcctgcaaaggaagaggcaggactggagaagggaaagagtgggccttctaaggctcccagggcaggacctctttttgtctggtctaagaggggtattgaacccaagtggcttagatgctgaatccctgggcttagaacccaatgccctggagcattgatctcacagtgctggccagaaaggggctcgttggttgctactaggtcattatcactcccagggcacctgggcagtcaatgaaactgagctcagaaaagtcctgcctttatgatgtcccttccacttccataactttctccataaaataaaaccaagaaaaataatttttctcttgatytcaaatcgtatttaaaggaaaatagaaattttatttttaaagaaattgcatgttttcattgtctatatattgttttgaaatatgtacacgttgtgtaatggctaaattgagctaattaaatgtataacctcacatgcttatcatttttgtggtgaaaacacttaaaatccactctcttaacaattttcaaaaatatttgaaaaaatatagttattaactgtagtcctgtaactatttcctattaattatagggaagtagaaattttaatagtcatctttctcatgcttttcttgacttttagattcaagaaataataaacttgaataaaagagattaatttcacagtaatgcaatatttctgtaaaatttcacaccttgttgactgtcaatcagctgagaactttacacctcattaaaaatccattagaacaatggctgttccattagcccttcagtttatgccttaaaacatacttgtctaaaarcaacattgtttttggcaggctgctccttttgataagtggggacttgctctggtattaactgtttccaggtctccagaaaaaggctcagggtatgtctagggacatcagtgacaacagtgaggtagagcaagtcaatactgtgccacctctgcgctagccagagaacctctgctccaaggtgagttggttccccctttcattaaggtcctcaggccccagtaaaatccagatatggctttggagaggaacgctgtctgagtgaagctccctcagtttcataaccagcttagagcttctcagctctgacctgcctgttagcatggctggggagcccagtggtttattgaactggctaataacaaagattctgagataacgaaacagaaaacaggtaggttttgatgaaaaggaaggagataaggaggataagaggggtagtagggaggaatagtgggagaggggcaaagaagcattaaatcaagatttggagaatggctggaaacagtggcagagactcaataggagagtgaccctgacagacggggaggtggcaaaagtgcttgcaggcacaggccacccaacagttatttcrgggactgttcacaatctcatctacttcacagttttgccttgtcctaactcaggtcttattagagccagaataaattgccttgcatcgtcagaaactgaccattcattcctgtggtcttctttgagatttttagaatcccaaggactaaatatccctatccacttgcctttgttcactgtattggatgatgtgccattgcctgtctccagcattcactgagagcagtaccccaacatccaacacatctttaaatgccaaagggaagtgaaaatgtcctgacttcttaaactctaacatagcattcatcctattcttatattttttgaactttgcatcaaaacatacataaatgcaggtgcacaaattgtaagtgtaaaagtcaatgaattttcactaagtgaacacacttggctcaccagaagctaaagaaagggtgaactagaaggggactttgtagattacacttcctgacaccatcattatttaagaaagaactgtttcctaggtatattttaggaccttttatctggtgatatctatctactaactttaggggtggggtggaattgattctttttacaagattagtgaagctagaaacaactagcttttaattcattaaatgtaacctactttcaagtagcttcatgtgactgaaatcaatctgttttattttccaaaccagtggaatacacacagggtcattacatacattttgaaagtcttctgtttcaaatgtattgtagattaagaaacagaatgtggcagggcacggtggctcatgcctgtaatctcagcactttgggagaccgaggcgggtggatcacttgaggtcaggaatttgagatcagcctggccaacatggtgaaaccccgtctctactaaaaatacaaaaaattagccaggcatggtggtgtgcgcctgtagtcccagctacttgggaagctgaggtgggagaatcgcttgaacctgggaggcagaggttgcagtgagctgagatcatgtcattgcactccagcctgggtgacagagcgagattttgtctcaaaagaaaaaacaaaaaatagaaaaagaaacaacgctattggcacacccagaataatcactattggacttctgataccaaaaacaagggggatttcctcgtttttaagttttatgaaatgaagtaatattctgtatactcttccgagtttagcttctttgagtaggtttgtgagatttatccaagtgtggaatggagttataatttattcatttttggttttgggtgattgtatttttaaaattaaggtaaacattaaaagttagggtttaacccactactgggtattcacccaaagggaaagaagtcattctacgagaaagaccacatgcacaggcctgtccaattcacagttgcaaaaataggcaaccaaacttgttgcccatcgaccaacgagtggataaagaaaatgtggtatatatgccctatggattactactcagtcataaaaagaaaccaaataatgtctctggcagcaacttggctggaagtggaggccatttattctaagagacgtaactcaggaatggaaaaccaaatatcatgttttcacttacaagtgggagctaagcgctgaggatacaaaggcataagaatgaataatggactttggggatgggggagagattgggagaagttgagaaataaaagactacatattgggtacagtgtacactgctccggtgatggatgcaccaaaatatcagaaatcaccactaatgaatgtgtccaagtaaacaaaacccactgtaccccaaaaactatagaaatagaaaatgaataaataaaagttagggattaaaaagaaagtgggacatggtcattccagaagtctaaaatattataagctatatataaaatacaagtttgtaactattttttgagtacctgcaatcagcaagtttgcattaatattactgtttactccctcactttttaaaacaactaattttctatttcctattttaagaccttacctaagattgctgtcctgtggaatggttcctagcccacgtgaccttgtctgtgttgaagcatgagtgaatacatactaccatctactttagtgaatgttgatgataaaatggccaatttcatgtatttgtttattttcaagaaaaccttagagcactcgttctcaaactttaggatgcatcagaattacctggagtgccagaatcccctgaagtggttgtaagaactcattgctggggccaggtgcggtggctcacacctgtaatcccagcactttcggaggccaaggcaggcggatcacttgaggtcaggaattcgagaccagcctggccaccatggtgaaaccccttctctactaaaaatacaaagattagctgtgcgtgatggcgggcacctgtaatcccagccacttgggaggctgaggcaggagaatcgcttgaacccgggrggcggaggttgcagtgagccaagatggcgccactgcactccagcctgggtggcagagacaaattgaaaaaaaaaaaaaaaaaaggagtttctaggccccatccccagaatttttgattttgtaggtctgcggtgggatccaattatgtaccgtctaatgagctcccaggtgatagtgacgctgcagacctggctccacattctgagaaccactgccttagagcctgcacatcaagtcacgtttatattcctgtgccgtactcccctggtgaggattcctctggtcattcatgcatttacgtttttaaactccttggaatcaaccaggtagagattgtactcttgttgtcgtatttaccatcctaaatcattagcatctattatcttcctctgccctacaccacaactctgcttgtaacccatttggagcgtgttttctatgttcttgctttgtttacatattggtggccccaactatttatcagcttattaaagacatcaggccactatttgtctatatccctgcactgcctagcagggagcactgcagggactattgaattcatgcactgtattctctgctggcccattgatttcatccttatagcccctgcttctcacctgcatgtgtttttttcacaatttacatactgataaaatgaattcttgcttcttgctcatgtaagaatatggaggctgggcacagtggctcacacctgtgatcccaacactttgggaggccgaggcaggcagatcatgaggtcaggagatcgagaccatcctggctaacatggtgaaaccccctctctactaaaaatacaaaaattagctgagcgtggtggtttgcacctgtaatcccagctatttgggaggctgaggcaggagaatcgcttgaacctgggaggtagaggttgcagtgagctgagatcacgccactgcattccagctttgggggccccaaaacccaggagtgagactctgtctcaaaaaaaaaaaaaaaaaaaagaatatggaagttataaaaataatctgtgatcatataatgactgttttccccaaaaagggcattactttcctgcttcaaagtatgtatttcttaactaaagtgtttgtgggatatggctgcgtgttggcatcacctagagaacttawaaaaaaaaaatgaaaacaaaaacaaaacaaaacaaaaaactgatcttcatgtcccagaggttctcttctaattgatgtgggctgtgatctgggcatagagattgccaaaattaccccggtgattctaacacataaaaatgttttagagtttcttaagtactttttttcctgatgagtttcaagagggccactttttttttctggaagattattttcagaaacacctagcccttctttatttgtatctcctgtagatgttttccttctgagtttttctctgtgaaacaagaaaatataatgaactgtcatttgcacgttgcacaaagcatgaactttatttggagtcttagataaacttgttctgatctagaaatgaaaaataatgaactctgctgagttctgcatttmctgtctgaagttagctttaccataaggatctggtgggtaagtgtttgttgttcttgtcattaattattggaacagagttgtttggagtagatgattcattgtggaacaaatcgtctgattttgagggacattttccattataaaataattatacataaaaacagaagtattgctttaatactaagatttgtaacaatgccatgtcattctggttgtaatgactctgtgtctattccactggtttggaaaataaaacagattgatttcagtcatatgaagatacttgaaaataggttacatttaatcaattagaaactagttgtttctaacttcactaatcttgtaaaaagaattaattccaccccactcctaaagttagtagatagatagatatcaccagataagttcctaaaatatacctaggaaatagctctttctcaaataatgatggtgtcagtaagtctaatgtaagtccattttattttaccctttctttaggttctgcccttgtatcttagaataatgaaatatgaagtgaaatttggtgtcatggtttacctgtagccattttataatttagattcatgggtttacattacttactgaaactactggggaaacattaacaacacaataggattcctagattgataaacttcaacactcaagctatgacagttgttctcagtctcgtctttgattcaatgtaaaaatttggacaagttaattagctttcttttgctgcgtgtataggggcaggataaacttgagaattcccacaattattcaacccagatcaaagatatttgtctcaggaaatcaacaatattaagaaaaatggctttttgaaaaaaaattaaaaaaatgtttagcaccttcaaatatcagattcacatcctcatcatcctcacttagagattttaaaactaatagcarttttgtatggcacatttgcatttacaatgcatttttgtacacattctattttcccctaaacccagggagactggaagagcaacaatttacatatttgcgtatttttagaaagtgagtcttagaaaggttaagtgactaacctaggctcaaacagccagaagtgtgtggaacaaaggcaccacacagctttgctgactgtgagctcactctttctactcctccagctatgccagctatacaatagcaacttgtgagaggtgttaggtgtgagggatagtaggggggtaggggtggggaggggaagaggaagcaaagtcctcatactgattgtatttttatcacttttctaaaggattttatgttttacagcctatttgtcattggtggaaatatctctacactggtgctataaacagcaaaacatgcacttgagactccctgcaagcccatctaagttttaagggtaattgagaatagcagcacttgatacacatatcttcatttactatatagtgtgatcaattattttccctgatactaagggaaaattaaacatcttttcattggttgttgcatttctttcacggtgtttttaatgcactttgcgagcttttgtagttctcaaaactggccactagatggtagtgtttagttagtattgtcgcacatgttccattgtgggaactttgattctaataggaaacatttcatatataatactgcactgaaactgtttccccagtggctgaggcacacgataaaaactctgtggcttgagccttctttttcttttttaatgactagacctcccttcattcaacacagacctttcttccacatactacttattcagcaattcatttttctccccataatagtctttttaaacaccccacagtgagggagtgttaaaagtcctgcctttcgtagaattttgctctaaacttctgagaggtaaagcagatctggtgccaagatgatgtgttctagggaagtacaaggacaatagacttaaagacctgtgctgccagcttgtgaataattgaagatttgtatctcgaagtaaatttcagagtacccctgtacttccttgggtatctaaaccaaataagacagaagttgtagttgcctggtatagataccacattgccaaaattttacagtattttggacaatccaatagatgtcttctctctgctttgtttaagccttctaatttccccagcaagacaaagcaaaacaaaattaattcacacagcctgtttgcatgatatggtccgatggtttactatgctatgtttgtcattagtcacccaagcacagaatctaaaagtcacttataaccatttcctgcccccccatgactgctgattcttccaaaaccataaatctcctttactaattcacttgaataaccaaacctgcatttcaggttctcattctttacacacccaataaaaaatgagatgccatctgttattttattcattaagtcaagtyctgtttctcatgttctgcgggaattcttcccatgtggttttactgtttgtttcactttcttcaatttccctcatcattacacataagcatttataaaatacctcttcataaaatccactccagtcattctctgcagttaactccaagatctccaagatcaaaacagaccccaaagttgtcaatgaaactgttcacttgcacagtgcaggggctgggggtgtggttacttgggtgtgtgaatatgaactttcggttgtctgaggacaacaggaagccttgtttctggttgctatcatattaaactttagttaagatttttattgtttatgagatagggaattttttcccctgggggtcaactggggtcaccctatttcctgagggctaaataaaattggctgcaatccccatcgtacagattgtgaaaagttctgctttctctccaaagcttttatgaatccttgatcacaccaggccacacatctctgcttcagccaaattggttgcgtttaggagttctctcacagtagctgtcatcatctcttttttccataccacagaggctcaaggtagaactgagccccttccttagttttcccaaccaccagccttccctctgccccaacaaaacaaaacttgttcacacatgggatttctgcattgtaccacactttactgatggtttgaagaaatggaagcaatgttcaccataatgtgagaagtgactgtgtttagactttcatattcttaaaaagtcagttacccagtgatttctatatggaaggtgttagccttttgctaggtttgcttgggttttttctttcattcctacccttccgtacctctcctacttcaaaaattgcttataggaactccagatttttcttacttaatggcatttagtgctttacgtctctcctgctccatccaccttttaactcccagaactacgcaagtgctcagcagaacaaaatgggctttcatgtaatattaccacaacttgatagaagatatttttggttataaatagcttttaaaaaaaattttttggtgattacatgtgggtacgatgactaaattgaattttgctcttcgtctcatacacacaaacacacacacacacacacacacacacacacacacacacacacaggcatttatatatagagagagagagatggagacttgttctgtcatcccagctggagtgtagtggtgcaatcacagctcactgcagcctcaacctcccaggtgcaagtgatcctcctgcttcagcctcccatgtagctgggattacaggtgcgggccaccacacctggctattttttattattttttgtagatgcggaatctccctatgttgcccaggctagtaactcctaggtgtaagtgatcctccagactcggactcccaaagtgctgggattacaagtgcaagcccccatacccccagccttctgctcctatttgacctagaaattccatatagtagccatagcattcattcattcaacaaataattattgaacacctacttgcaaaaaggaattcagttcctattctgttggggtgataatctagtaaataataataataataatgaaaagtgtccatgcactcttctaggctccaataatccctatgaagagagggtatgcttaaacaacagatgcttattttctcacggttgtggaggctggcagtgtgagatcggggtgcctgcatagtggagttctagtgagggctggcttcccctatgccttcacccaaagtttatgtgttattaatatcagcagccctctatctctggatgtctctggtgccttagaagacatattctctacagttaaagagtgatcctcaagaacggacagggtaaatatattttatattgctaaatgcccccatttgaagggctatataccatttcatgtagcaaggagcacttaatggctccagcagaacaaaataactctacagaaaatttttatttgcccaaagcatctaacgagctggtccttccatgcatgtggtggcactcttgtgaactgcttcctgagatcctcttagtgcaaagccaacaacattcagtacatttccttcacttgccttttggcatgtccatgacaatatttccagctgatctaacttctagaaaatctatttcccacaagcaacaggtcttctattttcctgcttaagagtgtttatttttgcttttttcagcagcttcacaacttctgacttggttgactttttttttttttttttttagagagaatgtctctcctccatctgcgaagtgctgcattttaggtttggtctgacaatttgatgcaacggctcaggtatatatgacaaggaaatggaatttctatcctcgaaatcaattctgaacaataaaagctgagaggataagtttattcaaaggtgatttggtattgcgacaggctgctccaaatcagaactcagcaacctgattttgaaaaatttccaagttcatgaaaagaatcactttgtacataagggctttctacttgtttgggtttgagcataactagatagcttagtgggatatccatattcttgcatttgatgatcacatttggcatctaaatattatgctgttttcaaatgaaagaaatactgctgaataagagagctagaatgaattacatacaaagaaaacttaaaataagtgtcatctaagaagatgaaaaagcaaacaagtacatatgttcttaacttttgggggcttgcctttaatttttttaataaggcaattatctgctattagtaattataataggagctaaaatccagttaatagtcactgtgtgtgaaaccctgtgctgagcaccccagggtatggcctccaagaggacacacaacactctttttggagaaagctgaagacagtgggggcagtgactgaaggtcacggagttggtaaaaggcagagccaagctcaaacccacacagccacatacctgcaactgtgttgttagcactgcactccccagttaccaaagccttgtttattttccagtcctaaactctgcttaaatgtgcatgaagagtaatttcattttttttccttttctagactgtaaatttgtataattggatttctacaggcttttgtgtttctggtgagattcaaaatggatttttcaaagttacgatattcagtgactcctataatctagaaatttctcccaagacaccagacttcctccctgatcttttgactaaaagcctggtccccagctgtattcatttcctagggctgctgtaaggaagtatcacaacctaggtggcttacaacagccaaaatgcattgtctcacagttctggaggccagaaatccaaaagtaatgtgttgtcaaggttgtttccttctgagaaccgtgaggcaaggatttgttccaggcctctctccttggatagccgtcttctctctttgtttcttcatagtgccttcctcctgcatatgtgtgtgtctgcatttccccattttataagaattccccttcacatyagataaggcccactctaatgaccttattttaactcgattacctctctaaagaccctatttccaagcaaagtccctttctgaggtactggggttggaacttcagcctatttttgcagggacacaattcaacccatagcaccagctctgaaccagggtagtgcatggaggtggagacctagtaccgtgctaaggaccccagccgacagtgtggtccgaggcaagtttcccttctgcccaataggggattggattgactgatttctactgtaatatagtacaagtatatatagtagaagtatatatatagaagtaacatagaattctatttttatagaatggctgtaatttatttaataggttttctcactgaagtaatttcataaaagtttttggaaagttggcttcatccttctactttcatgcatttgccgcagagattaagtgtctgccaggtattctttcagcgtgatccaccggggaacccacagacccagcctcctcccactttccttttccttctgagatctctttattcttcctgttctgtgtccaaaaagaggaaccaactgccccctaagtctatcctcacatatagagcctcttacatgacaggtgtcaggagaaactaaaaacgattagacttagaaggagctaactattaaatggtgaatgctcaatcaatattcattaatcaggaaggttgaccattgactttaccctctgtgacttcactggctctttcacagcaacgattcttgagaaaatacatggccaagccttacattagctgatctagttttcagagccccgctaggatatgagtcctggtattgcagatgaggaaacagggtctcacagatacacagaagctcctctgggtgcacacagtgagtactgggataggcaaaggctgaactcaggcagcttctctccaggatccaccctgagtgatgagctgtgtcccaggctggagaagagccatgctgcccactgtctgggcctatctacaagctctttcattcattcttggatttttccagctgaaaaaaagtgttatatgaaggatcagagatggcatcttaaacttttttttgcacaattcatcattaattcactgttttttaaactgttgtcacaaagagttgttttgaatgccttgatgaactatgttttgtttgttttattatattttcacttgagatttttactgtgaagcatgctattttgaagacaaaatttttaaaaatagagaagggcaagaagaatggtggacaatgcaggaggtgacaattggtataattacagtaaacatttataggtcagtggaacataagccctgagggaaggctctgaaagcggacctgcaagcaggagggagggagggaaggagggaggcagccctcgcaggctgccgggaagcaccagggatgtcgtgcctcactgtgccagcctcacagatggcatctcagcgacatggctgttcttttgtcttttcttcatgagcatcttagagaagcgcatttatgcacatttctacctacaaagttttgcctcagtgtgactcatcttctttctgtctcagataggattactcttcaaaggaaagataaaaaaacaagttctgaatataaagatgaagccaactgcagggcttgttgaattacctcagagatagctagagttgtctgtgtgtgtgtgtgtgtgtgtgtgtgtgtgtgtgtgtgtgtgtgcgcctctgtgtgtgtgtctgtgtatctgtccatgtctgtgtgtatgtctgtgtccatgtctgtatgtgcatctgtgtgtgtgcatgtgcctgtgcatgtgtgtctgtgcatgtgtgtgtatacacatgagtgcaatgtcccatattggcaaataccacatggtaacgtcctgcacgccacaggagctgtatatatgagctgtattttcatgatggcccactgggatagggattaaatcagatgatcaccatttatacctaagtagtaacacttaaaaatgcaattgctctctgtcaccacggcttaatctatgagcccctaaggggaaaaaattcttacattaaaaaagccatttcatatatagataaatgttgaataggcaggtgttgatcagaaggtctaatccccatccacgtgaaatgaacaagtcaagcagataattgttttactagagctttcctttgcattaaatgtgcctggaaaacatttctaaaaccattcttttctttttggttgaaccattatgaatgaatcttcatcctttaaaaggctagatgttcatgttcaactgttttggcaactgacctaaaccaatattattatgaacacattttggttgttttggttggacattggtaactgccagtgaagttggaggtgagaggagttaactacttccttataatgtcaccacctaattagaataaaagcatcttagattaaattctgatttacataaggacatttattaactaaacaattattcagcaggcatgaaataaacaaatcatatgactagttctctctctaggtgcttggccaccgtttgcaagcttcccttaaggcacaaaatccaaaattccagagtcaatatttcatcatcactatagacaaaagtttgtggtattcacagctggacgctggacatctcccaggacgtggttcctgagtcattctgcctctgagtgtgttgctcccatggaaatcatgcacctccacggaactcactcaggctcctcggggactcctgagtctgcagtcagattgctagtcttgctctgatttcctacctatcggacattccatttgactgtcttgccactgaactcaatgggtgtaagctgactcttcttccctgcatatcagcatcctcctgacttccccacttctgtgaatgtcatgatcattctttctgccacctaagcttgaagcctacagtcattttttaacacagccaccttcagctccaattccaattccaatcagtcactcttttctcaaatctcccttcataccagttcctgtccttctgtctcttctaccctaagccagagccatatctctgcagatcaagggcctttttgttctgtttcttccccagtcaattagtttacatgatgccaaacccatcttcttaaaaccacctggattagatcactcctctgtttgaagatttccaaagaggccttattttgtagtggaaaatgtccaaactcctttgcatattcacttattctcagcatgcttttaccaccttgcgttcttctccttcacggcacaaacctctatgccagctggattttccatccataatcccccaaatacatcacatgcattgttgcattggccacccttgttagtgctttttccatgtggtgttcttactttcctccttcactccatgcccacttcctcaaaacacacacacacacacacacacacacacacacacacacacacacacagcttcttggagcctcaaagttggttgctagtattttaagtgcccggaatttgaaatgaaaaaaaataaaagtaaactggttttaaatgtaggcgttgccacgtattggttctactgtggcctcagacttgttatgaaatatttccaagccttagcttccacatgagtacaatgggaataatgcctaccatcctattgcccatccttaattaatcttagttccgtttctgtgccacgtttcctccccagggaagccctttatacccttactactcatggatttatctcttctctgagcccatagaactgagttctgttgtcactgctttagtaaagtcaccatttgcttgtttaaggtccctcttctattttcacttattgtgtttcggagccacacattgtatcctatactagactttgaaaatactttagttgcagtgcattatttttgtgtagtcagagtacccagggcagtttctcacacattctctcgttttgtctcataacatcccaggagctggatataatctgtgatttatgaggagagaaagtgagagacagaggtgtaagtgagttgcctaaggtcactcagagagtgagtggcagaagcagcacttgaatcaagtcttaggattctaagcccggggctgtctgctccctcctagacctgtaactttagaagcaggaatttatttcatattgcttatatttcagtatttatttttaacccttacagggcccggtcttgtgactgactgtaattgagaaggtactctacaaatatttttgaaagaataaataaaatgaatactacagaccatgttaataatgtcaaataactctgggagtttgagggataattctgtcaatacgagttgagggtgtgcttggcctctccatcatttaccctgcttttatgagggttagcagcacaatgtcttcattctaaaacacagaatcatgaggttaaagaaagcatgcaatgccatcagctgagaagaaccagaattcacagtgcaggttctctaaagtggttttgtgttgctctcagcgccgtgaactcccaccattatattcatagctttttagcctttggctaagatcaagtagagtgtttgttctcctggcttttaataagtaatgtgttctccatccaaggacaacatatttaggctgtacatgcattacgaagtattaagctcctgtaacagtaaatttctcaacaggagatttatgtgaattctcttggatgttattctgttgacattaggaacaattaggaatataaaatgccatggcagatttttctgtgatgctggacgtactgtcaggactctgagtctgtgtactcggaagtcttcctcagacagggacaaggcgcattctctttcttaggaagagaattaacagtgcactcccacctccctgtgctcaccacatgggcacacatcccagggcgagggtggagtgagctcagaagaacccacgctgagcacaatgaaagcaaaattattatcagagaaagaaacagattgcagcaacctgggtttaacaggacacatagtagtagacaggaagtttttcgtgatctataacacattttcatattagggtcatgttaatttcacaatgaattgcatattaggctcaattagagaaacaataaagaaggaagacgggatgacagaaagcattgaagaggaggaagcagaatggaggcagagggtggaatcaaaaataaggacaaagagaggaaggggaaagagaaagaaaatgagaagtaacgtcagcagctccgtaggttctgaggtgagttagctggtcgtaggtcaacagctttagtcacacatcctgttattcactttgggcatcagagcacattttcactaccctttgaaatttccatacagtctacagcgattttgtagcaatctttctttaccgggaaattgcttatctgcttttcttttcaatctttgaggtcaacttattaaaggctttagtttcacatgaagcccgaaatattttgaaggtaagaaaaaaatgtgcctttggtcttaaatatttccacttaaatcttgattctgggctactttaataattccaaaataagagtgagtggcttcttttttcaataactgaaatacaacatttaaaaacactcatgtaattattttgctgtgttcagttgtttgaaagtagacaaggtttgatttgacagagctgtgttttaacctgggctctacatgtcactaaactactgtcccctgtaagctcctgtttcctcgtctacagatagaggtactccagtagctctccaggctctgtgtgtctctgtcacaggtttggcataaagtagacaggaatggtgtcagttcctccctccccaaactctctccaatgacactcccaccaagtgcagaaacgtacagaaagaactcttcctgcttttcaacttccattgatcacactgaaagaaatatcacattagcttataaggctcaaaattatcttcagtgctatagctctgtgtactctaaaatcagagcaacataactttggttctggatgaaatcgaatcaggacctgactctactcctagaagaacgctgaccccaaactcctgttttgcagaaccctgaaggagcaagtaaagatgccagccattaaatatgaagaccttcagagacctagaactaatggaactaaatcaaggatttctattttatcttagattaaaatgccatttatatgcattcagggcatagttttcactcccatgaggaatagattcatacctgtataaagctgggaatataatgactaattaaatatactgtatgacttcaatatagccaagaaaattacaatcattccaagtaatactgtttttccccagacacaaatctgaggatcttgaatcttagcactggaaggaatgtagacatcacgcaggctcatcacttctctggcacagaacttgacttgccttgagcacatgtctggtagcttcttcctgggaacatagatgacataacgcatattgcctttccaggcagcttgatctgtcatgagacagctctggccttttagaaaccagcctttatactgagctgtgagcctgcttctctgtattgcacattttttgttcttaattctgaacaaaaagtttttgtgaattttcttcctggaaatggtcttcaccacttgaaacaactgtcatgcccatctgagcatatttcttaggtgaggcttcccagtttgggagacgcttctctcataaaatatttctgaattcatcagtatctctgttcctataaaacgcgtggctgtctacttcaggcaaatcctaaccaagctcaggtaacagtgaagtgattgtttgctgtgaaacagtattgtactgttgaagttaaagaggtctatgattacattgtgtttattttggattttgcattattgagtattttttactttattttctttttgtaaagcccatatcactacctataacaagcttttgataagtgaactttctaatttttcctattctatagctatgtaagggaatctttaaattttgccaggactttctagcctaatgcaacaagggaggttacattaactataataatttaaatttcattagttttttcccacatttgctgaagcaattcttctacacaatctatttcattatttctgggagttctaaatgtgtcccacaggaacacatcccccttcttggaaccactgctcttccaccagaaccagcagctctctggactccccaaggcttattaggtctcattgttacccagggagtcaagcagctatcacaaggccatgctttggctttgtagctgctccaatggatgttaaaatttctcactttgttcctgatactgtacggaattatatgcaacatctctttacttaaaagctctctgcttctcccaggatccagagattcatccctggaaaagcattcaagtgcagctgccatattccatttagaatgcctccttccttcagacagccaaggttttgttattgggctcagctctatgtgcccagctccttcttcagtacaaggagctctctccaaagaggtcactaaatcccctgcaaatagtctttaactagaccttttcaaaccttgtctcttttttttctttgaaatgacactgtaccatgaacatttttatgaaatcattaaacatgttaaacttcatcaaagccatcattttaaagtcttccatgatgtctatcttatagagatacaccatactagaatgcatttttttcatttttctattgctgagaatgttgggttttatacatagcttgttattttaagtaaatgttgtgctttaccttgttcctattatacttttaattcagcctactgttagcatctgtggatgattttctatgcttatatgtcactcaatatattagcatcattcccagcttttggctttacatatgcatttttaagatgtgtctcttaccttttaaccatcaaatcagattttagttgcttgatagacccagcttttatatttcagtttatgccacctctaaggtcgttgtagtgagatgcctatataaaagacatacaaattcaaggagtgaattaaaatctcacttgaaattttaaatgtcactgaatattaattgtggtcgctaattggtatattttctagtaatcacttcaaaagctcctcattaaaaataaatcataaaaatatagaattataagagcttttaggtatagttcaatgatctaattccatccatttatctgtccatctatccttcagcaagtcatttatcaccttccttctgtatattacagatgataataaagacatctgggacaaaaaggtaagtcacagacctacccatgtgtatgggtgatagagtagtgaatacaagtgacaaagggtgtgattccttctgtttgagaggtgaagaaagtattcccaaagcaagtgacattgaatcagcaccttaagataaaacgaagaactcagcagaaagaaagtgaatgggaagatgtggtaataggtttaaatggacatggcatgtcggcaactaaatttctgtagctccagaatattctccccagtcccctgagacgaagttacagagctgtgaatccggtagtgaaagccttggtataaggcgcataagaaatgtgcagattatctaccatgaaatagaggaagaaatcaaggttattcaagtagaggaatgacacgttttagaaagacttttgttataacgttatgggaaatggattataggctggaggcaagagataagacattgtcagtgtgacagaatattttattaataaagcacataatttatactcagatctatgtgagatgagaccaattcatgtcaacatgtccaatgtttttgaaaaaatgctaagtttttattatcgcttttgtttatttccctgtgaaatatagtaggctagccctctatttctcctggcgaaatctttagataggtggaaaaaaaaatgttgaaaaagggcatcaatgacctcttttatcttggttttatctgccttttggaagatacttgattcaaagctatgaaaaagcatctcaccaatcccgtatttcacttggttggacgatgtgtcaagagaacgcctgaggcttcctctgtccgttaacaggccagtcatgagtcacagtctgaacatgaggaaatgttcatgtactttttcatagtcatggcaatgagacttttttgtgcccaaagtactatcctcgcctaaagtccctgttaaaaaggttattttctgccacaggcaggtagcagaatgtcaagatccaattccaagtgcttcatcatcactcggatagcctcaggaagctgaggttttacagctgcctggaacccacatgcttcatgtgatgtagagcagccctgttaattagctgtttcaggattcttaatgccctatggctttggaaacacttgttagcccacagagggaggggaagagctggaagcaattggactacagcctgaatttattttaattcaattcagtaaccaccttatctttctaaatccctgtttagaatctgttgaaaattatagttgatttaagtttttctcagtgatgcatcctgagagaagagggagattacaattcaaggttttctgaagccacagaaatgtggagtgctgcagaaagagctgatcgatggaactttccagacacatgtatgcaattttctaaaggctagaaaatagatgccggggatggggagaggggaggccagttgatgtggaaaggcttgtgtagagtgcccacgagtctgcatttctgttcacctaccagaagaaacactgccagttccccccaccctcaccccccaaccattctcactgcagagagctggcactcaacaaactcataatttttctcaatacaattctcatgacataacctgaccaaccatatgaaacctaatgaagaaaacaaccattgccattggcaacaaatgcaggagttgcatcacaagtaaaccacatactttacttcacaaatttgaacattagagtaccaccggcaaaaacatggtaccatccttcggtatggatgagatatcagtttacaaaaccttcactggaaagtccataccaaaatttttaaaatgcatgcaaaagctaattgtgttgacatctttcttatcagagctattgcaaattattttgtctagaggtggttcttaaaacagccacctgtctgtccactaatcatgtacatagcatcctcttcctcatattcatcctctgaaataccaagaggtgaaagagtgtttcagtagctcaccattcttggctgttacataatgggtcagattcctttctgagtagtaggagaggtcagtgatccagatctatatatctttgtgctttttccactaatacattcttagaacctagtaggtgctcaataaacgttagctgtatgaatgagttagtgaatcaatgaatgaagtgttaatttttagaaatattatggtcagaattttactaggaaaaacatttcttataatcacaaatgaaagctaggtttactcaaaattgggaatagtaagtagtctttccatttcccataccacaggtatgcttgtattcttcttatatgcttatgaaagaagagaatgtggattaagttataaactatttgtacatgatattgtatatgtaaaaatcatgtcagttttgaggccaggatttctttgtattgagtaaaattttcctaaatatttgcccattgtattagttcattctcacattgctgataaagacatactcaagactgggtaatttataaagaaaaacaggtttaagggacttacagttccacgtgactggggaggcctcacaatcatggtggaaggcaaaaggcatgtcttacatggtggcagacatgagagaaaatgagagaaaaaccatgaaaaaggggtttccccttataaagccatcagatcttgtgagacttattcactaccatgagaacagtatggggaaaattgcccccatgattcaattatctcccaccaggtccctcccacaacacatgggaatcatgagagctacagttcaagatgagatttgggtggggacacagccaaaccacatcacccattttaaaacaggcttgatatcaatttattgctagaaaactataatttgtattttcttttacatttttaatgactgattgtacatttgttccctcaaaagaggctctccaaaatactgcctaattcctatgttaatagcaacccaaacatgttttcaatactaatattaaaacaaattagcttaacaaatacaaaaggtaatgcctggtttatacaatacggatttgagaaatgcaggtttcaacctgttccacaccatgcccttcattatattcttctgccagagattttattctttacttttcattcaatcagaaagaattgagaggaatttgaacccattctgcctatttagaatatcatttgtactgactttaatcttttgctcctaatccatgaattcctgaggtcttttatttacatccataaatttgaaaagcacaatccccttttttttttaaaaaaaaaaaaaaggaagttacttttgggaatcagagacatgtacctctttgttctcttggagagctgtgggttatgggagggaactcctcatcctgtttcctgatatgcagtgacttctctcttacacagatgagtcctaaaacctttgtgagctcagacaagttggctggttttatttttatttttttatttttgagattgtctcactctgtcactcaggatggagtgcagtggcccaattaccaactcactgcagccttgaccttccaggctgaaaccatcttcccacctcagcctcccaaatagctaagaccacaggtgcacaccaccatacccactaattttttgtagagatagggtttcgccatattgcccaggctggtcttgaactcctggtctcaaccaattcacctgccttggcctcccaaagtgctggggttacaggtgtgagccaccatgcctggccaagttgcctggttctttacatggaatgttctttacatggaatgttccaggatcaattaaacacagataaataacaacttatgttttgtaaataaacacatctgaatggaatcttactccaatttagatagaaattgatatttttcctttcaaatgaaataaatgttttagactaggacatcccaagtgaattgaagattggtacaggagcctgaggaaggaagtttaagagagtgaaagcatgagagaagagccaagattatgtagcccagagaaggaaagaattattacctaccattactttaagggactgtgcttcctcacagtagtggaagacagatgctcattttttattcaagactgtgtaaaataaatggccttaatttatagatgtggatgctggtttatatcaatacacctcaacctgggatggctccaaatcttgactacacatgggaataacttgaggagttttacaaaaaaactgatgcctgggtcacaccctgagagattcttatttatctggtctggggtggtgtggcccaggcactgaaatttataaaattctccgggtgattctaatatgcagccaaggttaagaatgcagctgtacagctgtagatggaagaataccaaaaccaggccttctgctagtgcctgagcttctcctcattttagtttctgtgatgtgttcagacattgtttctagaatctcctgggtaatatgagttatagtcctttggatggagtaatacattaacacatccatactcacatagtttggaaggggccaggatgcaaagggaagttggaggaggaagagaaggaaatggtaaagtccaaagcatgggtgaaggggggccaatataaacccacagagcaaaaaggagatgttgggtcatcatattctattacataaattggatttacatttccttgtctttcattgctggtctttattcccacaagtctccaaatacagtcataaaattctcatgagttgttatagcaaaattgcttatcatttactatttcttaaatgaatgcataaactgtattactttggcagaaaggatgctgctgggtatcatatgtaatgtatactagtaaggtggacaggaccattaggactttaaattcctttataatctcaaaagtctgtgattctgatcttcctggtcttgcaactccagaaaaggtggtaatcactggagtaggctatttatgggcctgtgagatagtgaaacatgctattaagacaaaatgagagacttccttctctgaaatggttccatataaaagtaatatatggcttaagtatccaggggctcatgtaatctctccatgtcagtatcttttacggggaattatttaaccaaacatgtattgaacacttacgtgctacactaaaatcccagatttgtcaagttcccgtttaaaaagtgggtactaagcctaagatattagcaatacttgtatctgaaaaggcctcacatctagaaactataaagaacttctaaaaatcaatcaaaacaacatagttcttagaaaatcacaaaggaacaggtttttcagactcgaggatgtctatatggtgaaaaagcagcagtattttagagttggtctgaactgactcacaggaacctatttttaaatgtccagaaatttgctaagcaaattgttaatgcatcaattatctaaagtttaattatgtaaacttcaagttatctgaaaaacataacacatactcaaaactctcatcccttcctaagtgttttactacattctgttatttctgtttgtgaggtcatttgtttattgcatctgtatgatggaaacactgtataaaatgacatgttattcccaactccacataggctgatataacgttggtagcttaaaatcagctttagtccaggtatttatacaatggaaatggaaatcagcatacgccacaaatcaggagttgatttttttttttttttttttttttttttttttgagatggagtgtcgctctgtcgcccaggctggagtgcagtggtgcgatctcggctcactgcaacctccgcctcctggattcaagcgattctctgcctcggcctcctgagtagctgggattacagttgcccgccaccatgcctggctaatatttgcatttttagtagagatgaggtttcatcatcttggccaggctggttttgaattcctgacctcgtaatccacctgccttggcctcccaaagtgctgggattacaagcatgagccactgcgctcggcccaggaattgattttttgtttaatggtgttgactgtctacaaactgattaagaaaatgttattaaagttgtacatcatgtctgcaaccattaaattgtaagtagcacaaaaaatctgggggaaacagtcttctagactttccagatgcagcaaagaaattgccttgttccaacatacatttttattgtttcacttttgtcttacttaaccactaagtaagacatagttcctacataaaccaatcatgtaggaattacactcctttttcaattacaactttggtttgattacctttgtggtcttctgttctatcaccgtctttttttttttttttttttttgagaaggagtttaactcttgtcacccaggctggagtgcagtggtgtgacctccgctcaccataacctctgcctcccaggttcaagcgattctcctgcctcagcatcctgagtagctgggattacaggcacctgccagcacatgtggctaattttgcatttttagtagagacagggtttcaccacgttagtcaggctggtctcgaactcctgacctcaggtgatccaccctcctcagcctcccaaagtgctgggattacaggcatgagccactgcgctcagctcaccatcgcttttagataaggaaactgagccctagagagtggttggctcgcctcaggctccaggacaaatatgacttaatcaaaactatactcctgttctttcattcacataaaactacttatctaaggatgctgcagcaacactgctgtcaggccagaattcagtaagtttacagctgaggccttatctatagaccattgattttgctcaaggaaaaagttacacaaactagcaatagagtcctgaccaggcattacaaattctacactgatgtgtaaaagagggactaggcacaaagaatacatgcttagcacaatctatctttattataggaaaagcaatttaaaacatattttactgagtagtgccagaaaattaccgaaaaagaaagttaatgctttttccttctcaaaacccttctataatgtgtaggcattgtcatattagagagactcctgggaaatgcttggtcaactaaaattgttaaagagctaaaattgaacattgactcagaagcaatgtgaaatacatcttcccatttccaggatggagtgcagtggtgagatctcagctcactgcaacttctgcctcctgggttcaagcaattctcctgcctcagcctcctgagtagctaggattacaggtgcctgccaccatgcccagctaattttttaatatttttagtagagacggggtttcgccatgttggccaggctggtcttgaactcctgacctcaggtaatcgacctgccttggcctcccaaagtgctgggattacaggcgtgagccaccgcgcccggctcactgacgctcttcttaatttcttctgcctaagaaatagaaggtattctcgagggaaaaaaggcattgacaactagtacagggaaattgatgacaacataaggctgtttgaggaaaaaacgtgggatctcaaagactgttggtgggagtgtaaattgaataatctactttggagaacaatttggcagtttctattaaaatttaaaaatgctgatatcttatcagttaatcctacttctaagtatctattattaaaaaaaatacttggcatgtattcccaatgcgttttgcaagaatgttctttgtaattgtcaaaaggtggaaatctgaatgccctccagtagggaaatggctaaatgaaatatgaaataaccatactattgaatactatgcatcagctaaaaatagcaagagatctttgttgagtgaaaaaataaattgctgattgatcattaaatataacactatgtttttaagaagcctcagaaaacagtaatatatgatcctataggcataaaattatttatgatatcacacggaggtctatagaatttattgtcctctatggtagccactagccacatgatgctatttaagtttaaattaataaaattaaataaaaataaaaatttcatgtctcatttctacgagcctcatttcacgtcctaatagcaacatttgaatggtggccagtgtaatggagagtgcagatctagaagaacaaacacaactggtaacagagttacctgggggaaggttgagtttggggatggagggctacagaaactttagagttctgcagaacttttaacatttttacaatgagaatacatcatatattatctagctaatttaaaacaaatacattgttaaaatgaaaagcatgcctagccaaaggatttctttcttttttttttttccgagacagagtcttgctctgttgcccaggctggagtgcagcggtgcaatctcggctcactgcaacctccgcctcctaggtccaagagattctcatgcctcagcctcccaaatagctgggattacagcatgtgccaccatgcccagctaatttttgtattttaatagaaacggttttcattgtgttggccagtttggtctcaaattcctgacctcaggtgattggcccaacttggcctcccaaagtgctgggattacaagtgtgagccactgcactggcctagcaaaaggatttctaaaacaatgtagaattttagtagatagatcagtataaattgatttgaacaccctacctttttagcctgttaactatctaaaagcataaaaaatagtaaaacaaacggcaaaatcatttcctccttccttttctacctgtgtctagtgtctattgaacacttactatattcccagcatttaaagtacaagaatcatgaggcaactgctgtttagactgaagtgttttcaccaggggtgtatcaagaggatttctttgtcataggttgatttcccttataactgattgattaaataattactagttggcttatgcaatgtttatataattacaggatataaatggtggttattagcctaactagaatatatgcctttataatattggtgtaatattcatatgtattttactacagcttaaaataataatttcagaaagaaattcaaattgattttcataatttagcaaccatttgagctcttccaggtcagaataacttcttgggaagccccagaaagaaaagcatatacctgcttttacagttatccatagattgactataaggctaggtattgagttggcggatgcatactttcttaattctttagataataggtcaatagtgtggtagtgaatcttgatggtaagtgtccttcgcatgtttcatactgcacagtagactagactgaaagtcccaggagactgtgagtgtagcaaagaatgaatcttgtatccccagatacacaaagaccatgtcttcactggacccacagaacctagcacatggtgtgtcttattaaatgcttgtagaataattaaataaattacattcagaaaacagtctataagtcttaaagtttacctttcaattatgtaattattacttttaatttataatttattaacagacatagatattcacaacacctgcaaaagagtttatttcaacttcttttttttgtctcatctaaaaagtgtggatttaatatagcaaagtttgcttctagaatggaatcttttagagtgtatatgcgcttttgaaaaaaatggtttatgattttgttatgtaatactgttatataagttattttagaaattgcatgatttattataatatcagcagtgaatttaaacattacacaaatgcctgaatataaagaaataggatcacctgtgtccaagttaattgccttcttttgctgtattcattagccatcaatacctacataatctaaggccaagatacatatggagcaatctatggacaggcaatagcatcccatgggagctttggaaattcaggagctcgagcctcaccccagatgtactgaatcagaatctttatgttagcatggtctccaggtgatttgtaggtccatcaatgtttgaagagcacctgtctggccttcagttgcctttatacatcttcttaccaacagtaccatctagtccaatatttttctgtcctgttagtttgtccatagtctcccaacaggcttctgtccacaaagctgttatttagaggcatggccccatccctctcatagtctttgctaaggttatgtcttttacatttggagatacaccaattgcagaggagggtgaaattagcctgagagcaggaccataacaataacctgattctaatggaggctgttaccagggcagccagtacccgaactaagtcatcattctgctggaagcattccgtttggctgcagttcaacaaaaagaaaaaagaacgcactccagaaaatcaggaaggtttgcattatctatcagctatgttcaaggagatgtttgtggaaagtcgagttaagggttcctggaaacattaatctctggacatgctggaggatgcaggtggatttagagccaggcgagtctacattcacaaatcacattaacatattaaaagacggagagctcttactctgaggagccccatttagttgtattcaacccagctccatatattttttaaatcacaaaatgcttttttttttttcgtgaaacattcattaaaattaggcaaaactcatcttcggtgagacatgctttgtgaaatgtgagtggagaggttcctctgaaattgtctaaaaggtaacttaagccctgatgttttagaaaatttgacttattatgtaacagtgaatatacctatctgtgtagtttcactattttagaagtaaaacaatgctttgatttcaaatattaaattaacttaggcattgctctcccactccatctcccaagctgtgactcagatatcagaacaaattttttacctagttagggaaaaaagtttcccaagtttcagagccataaaagcatcagtaaagcacctatttattgtagcactctcttgttttccatcttcaatttcctaaacattgaatatcttgtttttcatttttcttctaaaagcatttgtggtatataataacaccgcatgaaagtggaagagactatattggctcaggatgcacttgatatttgttttccttaaatgacaaatgaaactcccaattcaacactaggataagattttttttaagttattaaaccttagttaagttatatgacttcatactgggaaagtgagttccagagaagtttaatgaacttgttgaaggtgactttgctaacttattacaaaatggggaatacaactctggtttccctaatgccttttgtaaagcatcccagataaaaatctaggtttcagaagattccttatagttaggtatgaaaaaatgttatttctgaaaatatgatttccttatgagaaaccattgtttagatatgtttaactttagaaaaaatttccaactataattaaaatctatgaattatagacatgttcagtgaaatacactgtctcatagaaaccatattcaaaaaacagaatgactggaacagatgttatgtatggggattagagggaagttatccagttatattatactaatttgagaaagattccaaaaaaatcctttcttgggggccggtcaggggtgggtatagcaaatgaaagagaaagataaggaaatgtgttccttggtgttgagttttgaatagatcactattgtgttatattcctctgaatttaggatacctgttggattttgttccttatcatgtctgttatgtggacaaagacaacaaacgtttgtttcttcttgtcaatttcattatgcacaaggattctgaaggtccacccaagatctttcgtgcactaaatgtctggtgtttgtaatacaatgaacaattttggggagtttgaaaatcttttgattatgaccttgaggattagagatcatttggtgtggatgacttcgaggaagttatttaattttttttttgtatgtcagttttctcagatttaaaatgtgggtaatagtaaccaccttgttagaatgattgtaatgatcaaaacatgtaataatgcaaagtgcttatgcttagtgcactagtgttttgcacttacatctagttatttttttctcagtaattcaataggctaagggatgatctagtacagattgagatatgggatttttgttgttgttgttgttgacaagttgcagacaaaatgtttggttattcctctcactgaaataaaacccagaaatatagggtattataatatgttaaacatttagtggctatcaaaacttattttcttctttgaagtcagagtaatatttagagagggcattctggggtttccttttagcaaaataattagaagtaatttcccttagaatttttagaatgactatattaggaggaaagggaaggttcttacctaaattgtattgcaacttttctctgaaataaaataaacatgctgtgttaaaattgctggtataggccaggcacagtggctcatacctgtaatcccagcactttggtaggccgaggtgggaggatcacttgaggtcaggagtttgagacaagtctgaccaatgtggtgaaaccctgtctctactaaaaacacgaaaattagcccggcatggtggttggtgcctgtaatcccagctactcactactcaggaggctgaggcaggagaatcacttgaacccagaaggtggaggttgcagtgagctgagatggcaccactgcactccagcctggacaacaaagccggactgtgtctcagaaaaaaaaaaaaaagaaaaaagaaaaaaaaaatgccattgtaagttgtgccctataaaatgttaacgtttctttcaagtgaaataatgacttactatttcagcagagatcactctaacatttagttttaatctaggaaaaaaaccccatataactagatttggtctttttattaaaatgaattgatcttagaagagcacatcatatgctcaaaatatagctgtcatgtaaatcaagacatatatttgttttgttcaatgaaatctagaaactcttaaaaaaactgtttactggcttttgatgtttaattgggtggaatgtataagaaatatctgatgaatttttgacttctctattgacttccaagcttatatacagccaatgaacaaacttttctaagtcttgtactctctttccatttctacacaaattcatattgaataggaaatattgaaataagatctttagaatcctcctcttgcaaattatagaacatattaaaaccaggttaaacttatttaaatctctttatatattgtttacccacctaccacgtaaatgttactgatttttccatagtaaaaagtctaaaaatccaatgcatcttacctcccctaaactacctatctctccaaacctctcattattcctccatatgtaccttctttcaagacttaattcaagccctgccttgtttttgagttattctctgtctagataaattattggtcactccttttaacccagaaggcaccaatcatttctattattaatttgattcttagtatttattttctttgttgggagttttatttatattcccttctaaagtagatattttacttttttggaaatctctgcctactagcccagtacctaataaaaggtcaatgatgatgatgatttgaaaaaccatgttctacagtgttcagatgtgcttttagataaggggatgatataactttatcatcaaactttataatgaaaaataatcatgatgaaaatttaagataaaataattttagaatatattatttggctaagtggaaaactatcatggagtttaattaaaatttcttcatattgaaagaagacaggtatatagaggagaaaaaaacataaaaacaaaaaacatctcaggaattccaccttcagctgcccttacttcaataccatgcctcagaaagaacttcatgacttggcaggtttacaggttgactcagtgtatatgctgagaatagccaagggcaaaatttagtgttaactagatcaagaactcaggggacccaggtgtctactgttttccatagaaataaccataaacaattttaaatactagatctgctttccttttgggtttgtataatgtagagtcaaaatagaggctctggcacctcatagacacagatttaaatcccatttatgccattggtaaactatatgacctctggcaagttatttaacctccttatgccctcatctctaaaattgtagtacgaaagcaacaccctaagtatgattgcaaggattaagggaaataaaatgcaaagttcctggtacataattgatatctactaagtgtgaatttctctaagttcctcatatcacataatggtagatttttatttactgggtggttattctgtaccaggcactctcctaaacacttatatcatggggattaacacatttaatccttgtagcattcttttgcaatagctactatcatcatcatcctcattattatcgtcctatttcacagatctggaactgagccactgaaaagtaaagtaacactaactagtaactagtacttctggggttcaaaataaacttttcatttctaaaattaacccataccttcttatccagtagacaacataacctctcccactatcaggtcatttccatggcctatatcctgtggacaatttgaaagcgatttccttttaacccttgtttatctaattagaacatagtttggagaaacatacaatgttttccatagctgagtataaatcattttcttccatccttttgaattagccacatcattgctctctttccattgtgggaaatctagccttgcttgtttgtacctagacaaaagcacactttttgtgtcagaacctgtgaaaattttatcttccttgttaccacctataaatgattaatgagacaaaacattttcaaggattccaaataatctaaaaaatcccacaaattttgaaaatccacaaagaggtatctaggaaaactttcatgaagttaagagatgttatctgctgttctaggcgtgggtgactttatcaaaacatttcgcccactttcaaatttccacttgttaaaacctgaggccttatttggctgtcacttactgtacagtgtttttcagacaagttcctggcagctaattttaaagagattttgtgaaaaacacaagctgtggagtgctcctgttggaagagcaccctctgaccctctgccttaacataagaaaaaattgccagtctgtccaaacctcacccacctttggttatcttcagaatcttacaatttgtgtttcctaaggcagcaattttcaagcatgactttgaaacactgcaggctttttcaagttatttcaaggactggccaagaattctcaaaacaaaattaattttgtatttttaaaaagcagtatgcatatcatgtatcatttggcagatttaggaggttaacagtaagcattaggaaattgaatcaataataataatgggatatggggacctgtaaagaaactctcaatcctgcttcattacttttaatggcaaaaactgtaattacttttgcaccaaccaaatacactgaaatcctttaacatacaccaaagcaatgggagatctgcagaatgcttttgtccatgtttaaccataatgatcaatgcattttgaatagaatattgttatatctactatttagcttaattgtgatcattaacaaagtgcccagactctctgaacattctacatggcatactatttgtgagaagatcagcatgtaaatagtttactctttgtaagctcttctacaaggtggctaaaagcaagaactagaacccagagtcccttgcattcaatgaatttccctattattgcccatatcattctttcttttctttctttctttctttctttctttctttctttctttctttctttctttctttctttctttctttctttcttctctctctctctctctctctctttctttctttctttctttctttctttctttctttctttctttctttttctttttctttctttccttctttttgagatggagtctcgctctgtcgcccatatcatttttagtataatctcttcctttacttggtcactaagaatcacttttctctacttagagccagacatttaaatatctccagcctccaagatctcgtctgggtacttgggctgcactttttcatgtcaatcattttgcacttgtcatctatcctattaggctataagctccccaagggcagatatagagacatagtatcaagctaacctttttatttatttatttatttatttatttatttattttgaggctgggtctcgctctgtcatgcagtctggagtgcagtggcatgatcatggctcaatgctgcctcaacctcccaggctcaagcaatcctcccatctcagcctcctgagtagcctgggactgcagacgcatgccaccacactcagctattttttaatgttttatagagacggggtcttgctatgttacccaggctagtcttgaattcctgagctcaagtgatcttcctgcattggcctcccaaagtgatgagattacaggtgtgagccaccacacctggccaagctaatctttaaatatcctagagcacccattatagtgtctggcaaaaaataaatgcccataaatgtttgttgaatggaactgagtcttcagaaactagagattttttctaaaatatttttttttgccatttcagtttaatacatattagtttttctcacttatcctatcatctgaattttttatttctttgaacctgaacaggctttgtgtctacagactgctgagcctttaattttgttgtcgtttgttttgttttgttttgcacaaaactaaaaacatgtacaaatacatttttaattgcatttgttcattctagtttttactcgtaaagtgcacttctttcttttctttctttccattaatttctgaaccttcccttcttaaactttacccagagttttctcatcatatacgcatttcattttcattgtacttttctgcatctgactatttcattttccagttgttctggtatgtttttctaagtattgtccaatcctttccattaagttacaagctccttgagggcaagcattgcacacctgttttgcacaacttctaaggccgttcagtccctcagcccactgtatagaaatatagtatatatatagacaatacacacacacatgcacacacataccttgccacttaatgatgtaaagtgacaaaaacttttatattggtaaaaattatgagaataagaataatcatatcctgattcttcaaattcaaatatttgtctaacattttttgatgaagtcatagcacttatgtgtcattgaattgttgtgggcatgctaacaggaaagatggaccaagtggttgaccctgtccttctgtgaatagaacctcagagtacacttttctgtaaacatttaaaagacaaggaattggaacttaaaatggagcaaccaggggggcagggaaacagaataaacttttaaaattgacctaatagtaatcataggaaacaaaaagaatcattccagtctccatttttttttttctggatgcattttgtagctccctaagttattgggtttttaagaaacataaaatattcctagatcgttagagatgtgatttgatttcaatcccacatggtctgtagcatcactaagctactgggaacttccctatgcaaaggtttgagtttctttccaatgctgtttaatgtctgcacttctagtgtccacataaatgagatttaacaggctttacttcatactttcttgttacaacatttttactttttttccaattgcaaaattatttcttttaagctctctgaataagtttgttgaagctctattcatcacacataaaaatcttacattaaaaggcaataaaggaaatcacgaaaagctagatgtattccaccctcttatagttgaatacataaaattgtatatatcacaaatagtaattgaaactactcttatgaaaactatctgtccttctggaggggcattagtttaaatgcaaagagaaaacatatcatttgtgagtctaaatagtgttgttagttctttgaaagggccctaattaataaggttgtagaacacaactgcaacctgtaaagcgttccatgtgtagtattttgaaaccttttgtttgtttgggttctaactagagacagagggagaaaaagtcaatttcattctcatgggatttgtcttatgtggttcatcagattgagtttagtaagcagggaagtatttctccttgtgtagctagtgcttgtttattcttcccttattaaaaaaaaaagagagaaaaaaacaaaggattggcatttttcttttatgaacgtggactgtagggagataaatagccctgcgggagaggaaggtcaagttcaaagtttttctttcctttggattcaggaataagcaaatggaaagactagccaaacaacccagcagcaggcatctgatggttaagccctccccccaggactttttatgtacataagcagcagaagtcactcgcgcagctgcggcgcattagttccaatagtttaacaggctgctttgtagcacggacaaagccgtgcgagcgcggtgctttccctccttgttcatttgctatgcgagcttgtcagtgatctttggcaggggcttgggagaggaggggtgacgtttaatacgcttccgcggaggagtgcgctcgcctcctctgcacccagccccaggctctacagagagactgaggcaggcgactgaatgcactaacagcagcaggctcagacctgcttccctggacatttccgggaccgtgagcgagggaaccacgttgccctggattcttgccagctgtacaaagttgaccaggaaaatggctcagcagacaagcccggacactttaacagtacctgaagtggataatccgcattgtccaaacccgtggctgaacgaagaccttgtgaaatccttgcgagaaaacctgttgcagcatgagaagtccaagacagcgaggaaatcggtttctcccaagctctctccagtgatctctccgagaaattcccccaggcttctgcgcagaatgcttctcagcagcaacatccccaaacagcggcgtttcacggtggcacatacatggtaaggtttgcgcagacctcgcagaaatggtggccgtttcccttcagggagtcctgctctcgcgcctttaattttgggggtagggagggaggaccatcatcattcctcaccggggatttatggccaagtgatctcccttaaccataaatcccacaaatgtccaagtcagggcaagaatcctggagactggtactaggagtggttgaggtgggtggttctcaaagttcaattcctattgcaagttcctacaagaaaattggatgccagatgtcaaataagaatgcagttttattcccatacgtacgtagtggcgtttctttgattccttaaaccaatttccctgccagcttccccaacagctgaggaaagaaaggaccagaaatgaggggaggaaaatcatagtttgctctgttttctgcatgatccccacttggacagagacacatacagtgtgtgtgtaatggtggtgtgtcttcataaagcccttcctcactcctgactttgatatacagtattcataatcttaaacatgcctttccaaaggaaagaagaaagggattaggaattctacgcagaaagttgcaggctggtacttggtagtattgttgtgttctttgaatttggattgttagaacattttgccaatctttttattttctttgtgaatatttttatcttctttataatgggtgaatttgtttcatgcatatgcttccatgtatttttctggaggattcctcatcttttcctgctcttggaaaaaaaaaaaagaagaaaaacccaaatattaaaacagaccatcatgtgagcttatttggagtatttggagtttctgcctgagtagaggccattccaaactctgatcagtgagtccaagtactagggtctatgttacacacttagataatttcaggtagtagtaggttctatacattacatctacattttgataagatgagtataaattatgataaagaaaacataacaaaaaagaatgagtgtgttagttgagaaactgtatgactaaataattttttacagttttgccataactaactaaacagtatgtacgttagcaatgggagggaaaaaaaaagcagaaacaaggcttttaggaggaaagcagcaaaaagtaaaaggaattaaaacctaaaccagtgacaagaccgtgctcaggaatgcattgatgttatagatgaaagtcaatgacaaaggaaataaaagccatgtcacacccaaagacatgaccaacctcaaaaatttggttttaagtagctagatctctgactgggaaagtgttattgtccccaggattttaacacctagatggcatttctgagtttggtagatgtaatggccataagaggagtgagacaaacattgactttttctgtcttaaagcagttattgggaaatgatggcttctctttgaggaagattttctttttggaaaaaattgtgagcaacaaacagtgaataaaagaaaggcatgaataaacactgggagatgcactgaaggagaaggttggctcaaggccaggcatcgggtgccagagcaggagagctggcatgagttcctacggagccaggaccagaatttccgtgtccagtgtcccttttggttgcgctgctttatcactgcagttcctaaattgcacccattgctgaatgagtggccctcaactcagctgtttgatttcagtctgagtggagcaacctagagttcagctggaggttatctgaactatttagacatgtcgggatgtaaggaaggcaggaaatcccatgaaaataggctttcttctgacatttctggcacttccttttctggtgctgtttggaaaaacttcatgagcacaatttctatcaatatttcattttagtgtatcaggtcacagcccagtaagaaaagcataaagagagcaatggaaaccagaaataaaaatcatggtatcgattttcagtaactcagaaggaagcagtttcccctatggactaaaactatcaggcaagggagttggaaagagtatctcaagttttccatattggttgaatgagccccaagacgttcataatatccacaggcatcttttgacaaaaatctcatttgtgctttcacagtttgtgctaagcactatggagaattttgaaaatatgtttcaaattgttctgacataaatataaatatatttgtatctaatttgttgctagtacagtgttctgcctcacagtttcctgctcctggtattcccctccattcgctatgcatacacttaatacctactgagtctaacatgtttattctgtacctaattattacaaagttgagcaagaaccatttgttggtttccaataatttataccatggtagaataaatcaataatattggaagacatctgttttagctaagataatcttgctgttctacaaaatagtctccaaatctcattggattgacacagtgaatttttatttcttgcttctgctttttgtggggaggcagcctgccctagccactgggtgcctcagggacctggaattctaccatcctgtggttccattatttgcaacatgtgattcccaaggttgccaggctcagatgaatcaggagaaagaccatgaaagaggatggtatgtgtgaacttttatgagacaggccgggaagtgcacatgtcacttatactcgttttcttctggctggaactcagttctatggccacatctaactgcaaaggaggctgggaaacatagctctgttccaaggcataaagtaaagtgctggtggctaatctatcttggttatatagtatgttaagggctatctgatttaccctctatgccatggttgaattcttagaataacatctgtaataacatatgccattgttgaattcttagaataacatctgtaataacaagtccttgaacctctcgtcaaacctccttgatgaagattatacagaagcacttctgttgtttgatagggctgttgattggaaagaccttgcttctaaacagtagaagtctccttccctgcaactatcatccatggatccaagatctgctttgggaatcctacaacttgaatttttgctcccttccattatgaagccctaaggcaagtggcttggagtaacccaccagagaaccagggccctattcattcattttggtatacccatgcttggcatgatggctggtcaatggtggaagcttaataaatgtctgctaaacaaattcattaatcaatattttagtgttctcatgctcttaaaaaagacttctcttgggctaagcatggtggctcatgcctataatcctagcactttgggaggctgaggagggcggagtccctgagctcaggagtttgagaccagcctgggcaacatggcgaaacaccgtctctactaaaaatacaaaaaattagccaggcatggtgatgtgtgcctgtaatcccagctccacaggaggctgaggcacgagaatcacttgaactcaggaggcggaggttgcagtgagccatgattgtgccactgcactccagcctgggtgacagagcaagactctgtcaccaaaaaaaaaaaaaaaaaaaaagggacttctcttttcttaagtaaacatcctgttatttcatttctatatgctatatttaccaggtagtttttatctagacttctcttgggttttcatgatccatttaaagaatagctactgaattgacagcatactctaggtgctatgtcactcagcaccaaagcagttagaaaagagactaaacttaaattcttactttgcatttagtaattgtgtgactttggtcaagttacttaacgtgtgcttcagtttccccgttagtcagttttctgggaatagtatctattgggggttgtggtttaattaagtacaattatgtataaattaagtggtttcacagggctggacccttagtgggtgtcattataagctagtattttttttattatgtactctgtgcccattattccagccttggtctgcatgaacctttaggatcatgtttaaatttctagatgattactctgtcagtcatttgtggatgaattagagtgaagagacaagagttgaaagaaacgagtgtatgtcagttttattactgtaggaaaggagaaggcagaaatgagagatactactgaggcagaactgtggggtttggtgtctcttctctgcccactgcaaaaatacatctttcaaattcctggttttcctaaaaggttcctccagttctcccaactggaagtaatccgttccttccttcaaggaacagatttctattgcgcctcttgtctctgatactctcaatgcttattagtaatagttttatcactagctagtatgtgttgagcactggttttggtctggcaccatctgttaggattagaattctcttgtgtctctgcttttcactaatctgtttgactgcttttactaaacatgcaatgccttgtagttctagtgattatagacatgattcagatttcatctggtaggggattccctctatcatcagcaggaactacaaagtcaatggaatctctggtgaagaaaacttaacttccagtactagtttatttcaggaaaattgaaatcaggaagttcttcacattcttcaggcttttctcgtcattgaattttaagcacagttttggggtgtaaggcctaaataagttttagaagaacaaggtagaaatgctggttttcagtctttgggaacttaaaagttgctgtttagtcatatttaagtcataaaacctgttatcttcacatattcttttaaaaagtaatttagcattataatcacttaagttataattttttcatatttttataatacacatctatatatccacgactcagatttttttttattttttattttattattattatactttaagttttagggtacatgtgcacaatgtgcaggttagttacatatgtatacatgtgccatgctggtgtgctgcacccattaactcgtcatttagcattaggtatatctcctaaagctatccctacccgctcccctgaccccagactcagatttttaaaatgccaaaattttgtcattgtttgcatcagttcttttatttttttaagaataaaatgttacagataatgtctaaagctgtcacccatcctattcttcttccttcgcagaggatcctgaaatcagtgtgttcttccttgaatgtcattgtcttttaacttcatatgtatgtgtcctgtttgtgtgtttaccattttatatatagagatggtacatgtatatatatctccataatatgccatactataaaatgagaaagagcaagctatatatatatatatatatatatatatatatatatatatccttaagcagtttgctcttttttagtacatagtataggaatagagttgtgaatatatatataaaatatgtgtgtgtatatatacatatatatgcatatatgtacctatatacatatattatatatacctatatgaacctatatacatatatacacatatatgaacctatatacacatatacacataygtacctatatacacatatacacatatgtgtacccatatacacatatacacatatgtacctatatacacatatacacatatgtgtacccatatacacatatacacatatgtgtacccatatacacatatacacatatgtgtacccatatacacatatacacatatgtgtacccatatacacatatacacatatgtgtacccatatacacatatacacatatgtgtacccatatacacatatacacatatgtgtacccatatacacatatacacatgtgtacccatatacacatatacacatgtgtacccatatacacatatacacatgtgtacccatatacacatatatgcatatgtgtacccatatacgcatatgtgtacccatatacgcatatgtgtacccatatacgcatatgtgtacccatatacacatatacgcatatgtgtacccatatacacatatacgcatatgtgtacccatatacacatatacgcatatgtgtacccatatacatatatatacctgtgtacctatatatacacacacacacatatatatatctatatacctacatatatatacacacatatatatatacctggatcattttttaaaatgctcaacagtacacacatgtaacagcatttcagtcaatggtggactgcatatttgatggtggtcccataatattataacggaccagaaaaattccaatcacctagtgaagtcatagcacaatgcattaattactcttgtgtttgtgggcatgctggtgtaaacaaacctaccatgctgtcagtcccataaacatatagcatatatagttatatattatacttaataataactatgttgctggtttatgtatttatgtattttaccattgttttaaagagtactcctcctacttatatacaaaagttaactataaaacagcctcaggtaggtccctcaggaggtatctagaagagggcattgttctcataggagatgacagctccatgcatgttattgccccagaagagcttccagtgggacaagatatggaggaggaagataatgatactgatgatcctgtccttgtgtaagcctaggctaatgtgtgtttgtgtcttagtttctaacaaaaatatttagaaagtaaaaacaaattaaaaataaaagcttatagaataaagatatagagaaaatatttttgtgcagctgtataatgttagtgtttcaagttaagtgttattacaaaagagccaaaaaattaaaagaaaattaagagttgtataaagtaaaaagttacagtaaccaaaattaacttatatcaaagaaataaaaatatttataaattaagtgtagcctaagtgtacagtgtttataaagtctatagtagtgtgtggaaatgtcccaggccttcacattgactcaccactcactcactgagtcacccagagcaactttcagtcctgtaagctgcattcgtggtcagtgccccatacaggtatatcattttttatcttttatactgtatttttaactgtaccttttctatgtttagatatacaaatacttaaccattgtgttatgattgcccacaatagtcagtagaataacatgctgtacaggtttgtaggctaggagcaataggctataccatctaggtttgtgtaagtacactctaacatgtctgcacaatgatgaaattgcctaatgacacatttctcagaacttagaataagcaatgcacaactctgtgtcaatttgcctctaaaaacccagctgtttatactcttaaaatattgttactatagctgtcagtatcacactccaatctaagtgaatgtcacaatgaaaaacattgagtcattttactataacggaaatgaagatgtaatttcctgaatttaacagtcaatttaggctacatagtgaaatattttcaagctactttgaaaacattaaccattaaaaactaatattcatgggtagcattcactaagatgcatcaggtttgttatttatgatatatctctcaaaaacatttttaattccaaatataattaaaaccaaatacagttttctaatataagtaatttcatggggattatattcctgattaaggactagatgaaaacattgtcaatttatactgtgctcgatgcactgaatggaggaaaatgttccagcgtgtatataagcgaaattaggtagtaggatatctttaggaatcatggtgactaggtaatactcaactgtataatttttataattcttgtatacacatatgtatttttaattaaaacatatccaacagtagaagaagtacttagtaacaatcttaacaacaaaataatttctttaggtggactttcaaaaggccttttaggagacttttaataaatcttaaatgtgtttaggaagctaaataagtgattttggccatattttttgtttactataaatttctctttatcaggcattggcattagatgtaaagttgctcatatttaaaagtaaacatttgctttctgagtcattatttcttcagcaactgtagttgtttttatggttgttaagagaaatataaatttgcaagtcatagaaggggaaagaaaccatttgtcacctataaaagagaaatacagccacttagagtttgtagagtaaaaatacacatatacacacacaaacaactgagtagattttcaaagccattatttagtgatttctctttgaggtctctttctccctcgttccatctctcttacttctgccctgcttagctttaaggttatcttttctctgtctcttatggtaataatacccggagaagagcattgctgccagtctcctgggaactaggaacccagaggagggctgtaggcaaagtgtaataccagaaggtggggagcaagtttctgggggaaatcatctgagaagcacaccaggaagtgctgctggaatgtttggggaagaccagtcagccctaaccttcagccatgtctgtggcataactggctgttgccctctgtggaaatcatgggaggtggaggcgctgcaagttgagggtgtctgtaccatttgaaaggcatagttggctttccacgaaatcaaaagacctgaggaagattttccttttaaagaacatgccgattggcttgtcatgtttaaggaattacagggattacattatgacaattggcattgagaaaaaagtgaagaaaaccttggataaccttgcagcttattattcacgtgtgcttcccatgaccattgacatttatcttaaagagaaaagatgtgaagcctgttcgtacgagctgaagccgttgctactgatggtaaaatctcttcttaagaagacatggtctttcttgcaaacttggcagaaatgttgataagaagaaaataaaaacttgaatcttaaagttcattaaaataatgaaaatcatggctttgattttttaaaaaatattctttgtgtaaatttctttataattgaaaagctcctatgtattcagataactaaaggagtttcagcactttttttttcttagatagaaagctaccaaatttgttcttcaagtagcactttcaggaagaagctttactatctctaatgtagcaaaataatgtcttttttttaatggttttgctttttaaaaaatcatgtttttaaagctgcgattcattcagtatattgaaatcacatatttccaggtcttctggtcatttgatacttgaccttagttattcaacctttttgacttggagactctattaataagtcatatggttataaaggcatttggcatttacaagtaaaaagtaatgactaattaaatttacaaagtgataacaaactacagtctatttaagattagcaattagaaacaagttccaacttgctgctgtaagaaagtaaggtagatgctacatgggtaaaaacaggaaacagaattatttaataattctgtgactcataaataggattcagggccttcagaatgaaggtattggtggtattcacgttaggccaccatctgaaaggcataattttaggtaacagatagggaaatgtatagatcactgtaaagattctaatttaaaattctcttttactagacttcaattttataccatcttaacacatcagtctcttctactgtaaataagcaaaacagaaaaatcattttatgtgcagttttaaggacataaatactctccaagtatttcagatgaggcacttattctcaaaaggagatcttgaaaagttgatctgagaagaaattacatgatttcattttggaataaaaacacttaggttcataataatatagctttataaccttagattaattataacatagacgtcaatgatttagctcctgccatgtgtcaggtactttgtgtacattaaccccttaaaacaaccaaggttggatgtaagtattgttaaccgtactttacatatgcagctgctgaggcccagaaaaagttcttacataaccaagatctttcagctaaacagctatgaaaccaatagcattaaaacttgaacccaagtcttcctaactctccatcgtgtgttctttctttcagcattaccttcctttgggctaagaatcacattcacatttgttaccctaccctgcatgtgtattgaagttataacaatgaatattcaaagattttacaaaatagtagttaacagaaaggtagagacagagcccttttttggtgtggaatctcagtttattagtttacacatgtggcttgtatagaagttgacatccttataaaatattcttataaaaatatgtgtgtgtaggagaaatatatgtccttggtgaaaaggggtcaatggagaacatttgattcagggttgtttttacataagaggtgtaaaaacaaagccagccagagaataattttatagtcaatcattcagggaaagaaaaaagtcttgagctctaaggagaaagatcaagtcagaaatctgttaaggtttgactctggaagagccagctgggaatgatggccggctagttcaagtcactaagcaacagaacagcaaactgcttggtaacaagatctggcctgactcacaggctctctttgagtgacctaggtggccagatagaggaggaccaagacccatcttacctcaaaacaatatccttccatttccactttgccagccttcatgccaaattccacattatagaatagtctctttgacttgagatatttccttttagaatggaaatatctctgggactagaagctaatattgttgtctttcttctcagaaatagtgtttcagagattgttttctgtgattcaatatattatttaaaaagtgtaagctttaataagagcaaacaaagtggaaacatttgagttggtggtctgacttttggttttcgtaagcaaatgtatacagggccaaaactacctaccttcattgggtgcaatctttctttccttgggctctcagactgaatgtgttgacatttatttgtcattttctatgttatgctgtcttctagttcatgtttgtatttcaagtatgtagctggactgtaagttcctaaaaagtaagaaccggccgggtgcggtagttcatgcctgtaatcccagcactttgggaggctgaggcacgtggatcacttgaggtcaggagttttagaccagcctgttcaacatggtgaaacctcgtctctactaaaaatataaaaattagctgggcatggtggtgcatgcctgtaatccgagctactcgggaggctgaggcaggagaatcgctggaacctaggaggcggaggttgctttgagccgagattgcaccattgcacaacagaggagataccatttcaaaaaaaaaaaaaaaaaagtaagaacctccacattcatcaatcattgtatccactgtgaaggtacaagtgccacctgtataatatacattcaataaatagttgttttttgatcgattgagaaacataccttctgttgctgtgtcttttatgctgaacacccagggggatccatacccttccagactagaagtcctggtgatgttggttttgattgccatagtggaaaaaaactttgaactcaatgattaaccatttgtgtggactttgtcaccatgactcagtgtgtgtctctgtgtgtgtgtgtgtgtgtgtgtgtgtatgttttgggtttacatgcacatagattggtatagttggctttggtgtatatgaatgattctgtatcttattattctgtcacaataatttgtcaaatacatgcattttaatatttagcttatactttgaaaattatttatgcctgttatatttctgaaaaaaatctgtgtaaatgtatctatgattcttgggaaattactgaataactagcttgttaaattctgatgactaatccttatcttttagaattcataacagttaaattatatatcaagacctaagcttacaaaagaaatgtcaagattttgagaaatttgcaaaaaaaaacccttcatagtttcattttcagtgttttaatttggagaaattttaactggcagaaattaagtaccatttttccaaagtagatcttcagaagaactaaaataatagaaaacctttttgaaggggtttagcatagaaatattattttaatataaatatttttatacagttaaatattatatatatcatttttaaattgcagtaatttgagaccaatttttccccattacccttttgagataaccctctgattaaattagctattattaaaataaagtggcttcctcttcatgttattagtagggtaccagttttttggtttttttttttcatacatggctaatttcacatttataaatggtgaagtgtgtattgttgaccttttgaagcaagcaactttctgacttaagattacttggattatcattcctgcttgtttgccttctttaggttaatagtatttgttttactttgctttattttgtgcagtgtgattttttttatgaccttctattgagtgattgccaaatagaacagcgtatgatttatggatactaataactaaaatatatatgaattgcaggctgataatgcacaaggctgatttctacagttctcctctgaatagaaccaggcttcctttaataaagccttcttactaataagaatagcagtttcactaacacattgatcattcttgaatcaccttcacaattttaggtgcaactgtgggccatttatactgtttacatttaatatttctagtagacttacatttttatttaaaaggccatatgtttaaaaataaagctttgtatattactgtaatttggaactagcgtcatttattatgcatagaagataattgaaaaaatatacaataaacaaggcaaaatagattcaagtttagctagataaccatgaccttccaaagactctgagcctgaggtctgttctctgtttaaaatggcatttagcaaataatatagacatatgaaagaccacaattaagtctttcttcttaaggtaataagaattactgaaagggatttggaaaggaaataagcttctccttatttaattcaacattttaaaattcaataagccacatcagctatgccaaacaccatctttgtacaacctcaaaccatctaatataccaacctgaaccactgatacttccaccataggaagagggacatttgttcttgcagaagttcttctgttctcaatcccttagttgcaggtaaacacactgaacttggattgggtgatgctaatccctaagcagaaagtatgttggtactctgttttcccacactgtaattattaagttcttacctggtagctgcacagatgcaaaaaaaaaaaaaaaaaaaaaaaaaaaaatgttctgtggaaaattctgtacctgccaatggtagattccaagttttacttccaaagagtgtaaacatgggtgttttaaaaagtatgtctcaatgcaaataaatgagagctaagtaaggaaccacatttttctaccctgtaatcttttttactctgtaaactaattactttccatgctagaatgctcacacagcactggctacgtaatttgtagggcccaggtaaagtgaaaatacagggcccgttacgcaaataaatattacaaatttcatgatggcaacagcactgcattcaatccagcacaaggcccttctgagagtaggatcctgtataacttcataggtcacacctgtgaagccagccctgcacccacaataggtctgatgtgatgcccagaaagtcgactttgtaagccctacaggtgatgtggaagccatacgttgagaaactgtcttaaagggacatctttttagacagtctcactctgttgcccaggctggagtgcagtggcacgatctcagctcactgcaacctctgcctcctgggttcaagcaattctcctgcctcagcctcctgagtagctaggattacaggcatgcaacaccatacccgcctaatttttatatttttggtagagagggggtttcaccatgtttgccaggctggtctcgaactcctgacctcaagagatctgcctgtctcagcctcccaaagtactgggattacaggcatgagccactgtacctggccttaaaagaacatctttattcataagctcctcattttacactgttgatagaaacttcagaagacaatgatatgcgttgaagtaaaaaaacagaagttccaagaaaagtcagagttggaccagctataaattaaagagaaacattatcttacattcatcttgagagttttctttgcaaatgaacacgtacatacacaaacaaacttaaagcagcattgcctttgcatttaaagtcacttactgatatgcacagtattagtcatggcaaaatattattagcatttgaaattgatgctcatccctctttgttgatactgtctcatttactggattaactttattcatatgagatctcccttttcttttcattgtctctgtttccagcaccttaattgaaagtacccccggttacataattattcctttgaccttattcagtatgttccctgcaccacaagtgtctctcctctgttcaattccaactgtcagctcttttaataaaccctactcttaaacctcatttcccaggctcaagttccatatgcctcctctggacatttccacgtggaagatccactcttaatttatatttaacacgcacaaaaccaagcttactgtgcccccctttttgatttttctacttctgtttatctggccattatcttcccaaaaaaccagaaaaaatcatatttgacttctgccttgccctccttctgcctaggcctatggattatttcacctattatctcttgctgttctgttccctcccaataccaccaggtattttaatacttagatttgtgtttgatctatttcaataacattctaacttgtctttgtgccactagctccttcccactaaggatgtcctacttatactgtctcattaattaccctacagttctgctttgattgtccactatctatagcagaggtgaacaaaaggaccagaaaataaatattttaggctttgcggaccctatggtctctggggcaactattcaaccctaccacggtagtgcaaaagaagcccagatatacaaatggacattagcatgttccaataaaactgtatttgcaaaaacaaataggctgaatttcgcccactggccgtaatttgccgatccctgccctgtaggataaagttcacacctttaacatggcatctaagcatctgtcatcagttctgcacctatctctgcaaccctatgtgttattgtgtcctatggatacttcacatccttcgttttgaagccgaatctagagcagggttgctcaacctcagcagaactgatgactgggccagaatgatgctttgtggtgggggctctcctgtgcattgtaggaggttaagaacatccctggccactgcccactagatgacattaatttccaccatgaggtgaaaattcaaaatgtctccaagcactgccagttttcccttgtaggggacgagggattgttttcagttaagaactactgccctagggagtaaattttgtgaaggggagaaccagttctacctcattcacaggtgtatccctagcacctagcacagtcttgtgatatacaaagaggttcaggaatctattgcatagtccaactctgctactcactgtgggatcctagggttatttaaattccacaaatcacaattaagttcatctgtaagtggaactattactaattcatacatgtttcataaaattatttagaagttcaaatgatatatttaacaaaaagacctcttgaaagacagtagtactttcaaataaaaggtaaacatacaattgatagaacactgaaggtgatctgagcctattgaaatctagaagcttaatttgactcacatactctgtctacactgtacaaattactatatgggatgttattggggcattgtctttgttctcaaggattatgacctaacaggtgttagaatatgattactcaaccataaaacaatagttgccataactaagcataaagagtggttggaatttatgggagggagacattgtatctggtactaggaatcacttaagacctcatgagtgagatgaaatagtcacagagaagtcccaggcaccctactgagcattgtcttagatgatctcattgaatattcactgcaacttgattaggtttaggttttattatcacatttcacaaagagagaggggcctaggaaggaatttgatatgaatgtgaagcatgggagatttcagcagggagagaactgcagtgaagtgtggaaggaggggaagtgacaggaggtgttttctcaccaagggaatagtgtgaacaaatatggggattacatggggtttaggtgagtttgagtgcctctagggaaggtaggttggaatcagattttgaaggattgctaacatctctctctctcttgctctcgcttgctcgctcgctcgctctcacatcacacacacacacacacacacacacacacacacacacacaccagggatttatatgtataaaagaaacatgatgatgttatctttcctaacagcttcactccacataacaggaagtgacattttgagttcttaccccatgctaagcttgctaagccacaagtatgtgcactgaacactttcaatagttggactttgagactcagttcaattagaccaatctataccatctttcagctagctactgctcttctacttttcccaagataatccttctgaaatagatacacaatgctgttttcattcaaatcagatgtgttaattctactagtggcacttgtgttctgatgcatagaacagaggcattatttacgtgaggactgtgccttccttcttactgaattgcaaaagtatacaattcttagaacacatctagcagttctgaggggctggacacagaaaaccatcttactctgaaggtaattttctctattttatcactagctcaccaaggtgagagtcaggagtgaaatatcctattttcttttcatccattcaaaaaatagtttgagtgtttcctgtgtacctattgttcttctggagatagagaactgaatgaaatagacagtcttccatacattggggcatactttttttttttttttttttttttgagacagggtcttactcttttgtccaggccgcctagagtaaagtggcatgatcactgctcacctaagccttgacctcttgggctctgggttcaagaggcctcccacctcaacctctcaggtagctgggactacaggcacatgctaccaggcctagataactttttattttttgtagggatgggggtctcactatgttgcccaggctggtctcaaacttctgggctcaagccattctccagcctcggccttccaaagtgctgggattataggcatgagccactgcatcaggctaaagagcacatattctaataaaggagaagacaacacacaaataaatattccagtgggtcagagaaagacaagtacagtatagaagaataagtcagggtaaggagttacagagttgtatgtaagacatttcagcagagatctgaaagagatgactgaacgagctatatgattatccagcagaagtacatttcattgtgatttcaagtacgccaaatgtggttggcgtatttgagggaggggggaagttatagaaaatgaggtaggagccacagaaaggcatcagatcacatagtgctttgagcctgtagtaaagacttgggtcattccttggtgatgactgtgatgtattgaagcaaaaagtgttagtagtaggaatgtctgtgttaggaagggacacagtctatcataagttttggaagaatcatcccggctcctgtgtagaaagtaaagatgtggggaaaatggaagcagagaccagttaaactattgaagtaacccaggtaacatgtattggcagtgtggactagagaaatagaggtaaaagtagttaaaaaaaaaaaaaaaaaaaaggtcataattctgtctaccatttgaagacacagccaacagaatttgtggatgcattggatgtgaagagtgagaaagaagaatcaagaataactcttaagtttgtggacttagcaacaggtagaatgtagttgtcatttgtcaagctgaggaagattgtggaaggagcatttttaggggaggtggatcaggagtttagttttaaaaaatttattttggggatgcctcttagatttctgcatggaggtttcacttagataactgaatgtatgagtctgaagtttggagcacagattagcacttgagatgaacacttgagagttattaaaatgtaggtggtattaaaagtgataagtctgaatgaatcacccagggagcaagtatatatagagaaaagacctgagacagttggggcactttaaaatctagaaatcaggaaaatgaggaaaactcagcagagaggccagtgaggttgaagaaaaattgagagtgatatctggaggccaaatgaacaaactgtttcaggagaaataagtggctgggcatggtggctcacggctgtaatcccagcactttgggcggatcccctgaggtcaggagtttgagaccagcctggccaacatggcaaaacctcatctcaaataaaattacaaaaatcagccaggcgtggtggcaggcacctgtgatcccagctactggggagtctgaggcaggagaatcatcacttgaacccaggaggcagaggttgcaatgaactgagatcatgccactgcactccagcctgggtgacagagcaagactctgtctcaaaaacaaagaaacaacaacaacagaaaagtgataaactgtggcagatgctgctcataggtcaactaaaataagaactgagaattgatcattgcattggcaacatgcagccaattggtggcatacaacacaagtcgatcagtagagtagtgatgatacaggactgactagagtggaatataacaaatttccccaatgcttaaaccaacaagcatttattattgcatacagtttctgagaaatcagggagcagcttagctggctggttctgactaaagttcctagaagaaattgcactcaagttgtcagtgaaggctatagtcatctgaagctgtatctgggactggaagatcagttttctaagatggtgctgtccgcaggcagccttgctttacactggctgttggcagaagacttcagttcctcactgtttgtgcttctccaaagggctgggtgttcttttttttgttgttgttttaatactttaagttctagggaacatgtgcacagcgtgcaggtttgttacatatgtatacatgtgccatgttggtgtgctgcacccattattaactcgtcatttacattaggtatatctcctaatgctatccctctcccctccccccaccccacaataggccccggtgtgtgatgtcccccttcctgtgtccaagtgttctcattgttcaattcccacctacaagtgagaacatgtgatatttggttttttgtccttgcgatagtttgctgagaatgatggtttccagcttcatccatgtccctacaaagcacgtgaactcatccttttttatggctgcatagtatttcatggtgtatatgtgccacattttcttaatccagtctatcattgttggacatttgggttggttccaagtctttgctattgtgaatagtgctgcaataaacatacatgtgcatgtgtctttatagcagcatgatttataatcctttgggtatgtacccagtaatgggatggctgggtgttcctacctcaggcacaggagtcagtgattcaagagagtgcaaagtagaagccacaacgacttttatgacccagacttggcagcaacacactattactctgccatattcttctgctcacatgtgccaaccctggtacagtgtgagagaggactactcaaagttgtgagtatctggaggtgaaggcctccttataaaaggactaagtcaagtggattcaagagatgatgggaaaagaagtggtggcaattgttaactcttggagttttgttgtaaagtcagttggaggggataggaagaaaaatgagatatgggcaaagggtgtgttgtcaattgtattatgtttgtgtggttttgagaaagaagcagcagaaaggggacatttgatcatgagaaactggggacaattgcaggagcaatattcttgaggaggctttgggggaataggggtaaggagaagttcagatagtgcacaagccaaggagttgcccttaatgggagtgctgattgttcagtcctcacaataaatgagaaagaagagtaggacagtctgagagtataggaggtcagtatcttgatagatctggtttcagagtgtatgaaaagtgtctcttaattccttctattttgtgataaaataataagctcatcaatgtaaagacagagaacagatgttggaggtttgaggagagagaaggtgagaaatgatccatcatctctgggaggagagagtgctttgtctagagaaatgtgaaattcccagacggcactaaggagccacctcaggccagtagttacaaattcaaagtcatcatggttgtgtttttcctcaactatcattgactgcttaggccacaacaagcacggtttgaaaaaggttggtttaacagagatgagatatttcagtgaagtctgagttttaaaaggatatgcaaagaagtgattatgctgccatatttactctaagctcactaaggaaaaggggacataagtttggtgagggtcagaacaacttctaaggtcaatgcactggaggactcattgggtttggaagatttttggagtcagaatactggaggggatgagctagaaagagagaaggtagggagagacgcttaacagtggttatggggcaccgttatctgtcatggcaaggccttgcttatggtaaggaaaggaggtttcaggtaagattatctgaagggagatccagaaactgggagaccgtgggaggaaaagataattatgagttatgtaagagtttgcgctggagagagacagggctaaaatgtttaaagactgagaggagagacctttaggtcagtagaaaactggattaggaggggagcagattaatgatgtgagttacaaagacattttagggcaaggaagagatcatggtctggaagcagcagagaagaatgagaaagactcctacttcactaggggcagaggtacaaacatgtggaaggaaaaatagccactgcatcagagggctgaagtaaatccgtattctcggtgggcagccagtagtgtcagagcaagatggtgcaggaaagtcagagaacatgctgaagatacaggagcataaggagattttgctgatgacagactgaacgctaggagtcacgctggcgagtttgcaggaattggggaaggctggggatttcaaagtaggggatttacagagccatctggtgatgagcaatgacctggcagtcttggactttgtgtggtgacggttgtgtattcaagacaaggaccttggttttaagaccatgtagtcagacaagcacaaactcctctgctgggatggccggtttctttggtctatttaattagttccagaaacagtaattcatcctcactgcatttatagaaattgaggggagaggtggtgggtaccagactggccaggtctgcccagtcatcttcacttcaacattcctgtctggtaaagtcatattattctcacatcttggccgtgtgtgtatgctccaagaatgagacagatgacagaagatacagaaaaacaattgggaaattgctagtttgcagatgtatagccctggcacagattttctaatatgaaattgccattttttccatgatttggacacaaaatcctgttcttgaatatgatgttcagcctagatattgaagaactgaaaaatatttttgaaaaaatatatatattgcatttgtcacaacagtttatacacataattatcacaatgatattgcttttcttaaataaataggttttatgtgttggcatgaaatacttttacaagatgatgccaggttttaacatttatacaggaatattttcattatcataattgttaataaaacaaatatgaaatgtatagctttctctttggagtttgaattgttggttcttactgcctgcttgcatatttatattagttgtactggctggcagttattaggaaatacgatcttctgtgtcttaggagtgcgccctgcaagcaacatgtgcaaacatttttttctttctttctttttttttgccctaaggaaaagggtaagctctggcaccttttaacctgtaaggattatgtggctcttgctgtgattgattggttggcttctcctcaagaaatgctcctggtgcgtattttatgttctcacagagccagggctttgctgatcagcacgtcacccctgtcaagacgtgggcttgcttttgtgcatttgctcttgcagcctgggaagcatatttcaacacactgtccagaattggctagaacatgcctgtcactcccagctgactctgatgacgctcttgccaacgtagatttacatcaacacagttctttactggaaaaagctcattcagaatatacagggtggcccatttaaaagaggcatagcgtcaatttgaagagaaatatattttaaagggagaactctaagaaatacacagtcaattgaaggctccatggagcatagaattataactagcatcacccgagaatttttcccctggagattgtcctaagctctaacttctagagactggcttatcctgaaaagagaacctttctgttctagactttttctttcagcatgctagatatgtaggcatttttagcctcttctttccctaaccatataatctgaacaccatattcattgaagaaagcatgagatgtgaaagctgataagatgcaggattatgtgacaccattgctttttacctgtgcaaaattcagtttggtaatcaatggaaatacagattttacccttcacataaaattgtttggcatatgtccatcttgttttttgactcatccttgatatcacaatgaatgtttgggataggcatattactcagatgtgtgggtctatagacaggaaatcaggcattcagaaataaagcttgttaccatagctatccaggaaaaaaatacaacactgtctttgctgtacaaaagaaaaattcaatactactgtcacatgatatgtgattactattattatgacccaatgctactcacccttcattttcatcattctagtctatttcaggtcattacagtaatggatacaactgaatgggtttgtaattttaccccttctctcatgacaaccagcaggattctcaatgacacatgctttgatctgtctgcttttaaatctcttaagcagggtggctctagatagcttcctctcagaagattttatgattctaatagacctcatgatgagttctatatttgtgcttgtttagatacatcaaagtcaggctttatactagggccacctggaaagttaaggtcatcagctttttgttatagtcattggattactgtgatgctcagcaataacaaagtttgaccttgtaaagtgatcaaaagttgtgggttacaatataggaatattaaagtatattctgccatgatgtgtcttctgttgtagtttgtctagaattaatattacagtcacaattaactccaaagtgttctatactgcttgcatacagtacagtgggaaagaagagatgtcaaaatcagagaaataagattcctccattatgaattaacatacaaaatctacacttaatgcatcagaactaagatgcaatgttttaaagagattgagttgacaggtcaatcagatggtaggactggtaagaatttgagcaggcataaacaattggcagtatgtattcaaacactgtttatgagagtgaggaactattggttaacaagctgacattaagcatttagattatataaatcaccttattaactgcattctatctatggatctattatcgatctgtatctatctatcgatctgtctgtcatcttttgttttgtctggttccatgcttccaaagacattttctgatcttcattgttacatagtactctctactgagtcctaaagaacacagttctgtgtcaggctgattgaagtgtaatgatttgagtgatgattgtagtgctcaatgaaaggaaataaagaatatttggactctgttcagcagtcatatgggcttgtacaatatgagtctgcttttgagagaagaaacttgcacaaatgtctctttaagagcctgcttttaattcttttgggatatatatctaagtgtgtcttaagatagttctatttttaatatattttttcatactgttttccatagtggttgcaccattttacaatcctatcaacagtgcacgagggttcaatttctccatattcttgtcaacacttacgtgtgtgtgtgtgtttacagtagctatcctaatgggcatgaaattatatcttattgaggttttgatttgtatctctctattagtaatgttgagcagcttttcatgtacttgttggccatctgtatatcatctttgaagaaatgtctgttcaagttatgtactcattttttggtggagttatttaatcttttgtttctaaaatgttttgaatagatcaaggtttaacagtcattcctctgtgtgcttttatgtcatgtttagaaatgtgactccattttaagcttcttaaatctttttttactttaccattttttgggggctctctttttttatatttaacttttgtctatctgtaatgtgttttgattatgaagaataaggaaaaaatttagggtttgtttagcttcccaaaccccactttatagaataatcactgatcatgtactaacttataatacttgatcattttaagtaggctttgttattgagttccacatttggcacacctactggtgtaatgattgctctagtattagtgcaatagtatcgtgttagattttgtttgcagtgtgctaagtggtaaacctcagctattaatctaccttgactaaatatgtaattgttccctttattaagccctattttctttcaaaataaatattaactatgtttcccactcattcttttttgggggaagagtaaatataaagaaatgtttccagcaatgtgggaggccaatgtgaaagaatacttctatattatagaatgactatttttgcaaatgcaaaatgataacagaattcccagataaggaatagcaatgactgtttcagggcattacctaagtgtgtttcttgggctaaatttagaatgcctgattactgcacacctggtatgaaaatagaaaacccttgtgcctacatcacataatgcttaccacattgaggtacagataaaagaagttctagaattagggttgttcaaagcctggtttactatattttggatataaaatggagtaaatctcataatccttctgaacattggttttctcacttgctaaataggaataaataacatgcatgaatagtatagaatggttgtccatgtgtctaaacatgataatttgtggggtatgtactttataaatgattatatgcaaaaaggatggccagacgcagtggctcacgcctgtaatcccagcactttgggaggccaaggcaggtggatcacctgaggtcaggagtttgagaccagcctgaccaacatggtgaaaccccgtctctactaaaagtataaaaattcaccaaatatggtagtgcatgcctgtaatcccagctactcaggaggctgaggcaggaaaattgcttgaacctgggaggtggaggttgcagtgagccgagactgcgccattgcactccagcctgggcgacaagagcaaaactccatccacaccctaccctccccccaaaagaagatgatgatgatgatgatgatgataattgatatcagtaacaacaacagtaatactggtgatagaagatccttctggtgcaaaccattctcaacaatatgtttgctccagagaaggtagggccagactcctaatcccaatgttgtttaaaagcccattcagattatgaattcatttgaagcattttaggacccgagagactactagaagtttaccgttaaacttagatgacatacagttagaaaaattttccatagtcagctttttcttctcctgttatcttctgtattttactaagagaatgtttagttttaactactagaaaaacgtaatttcaggttgattaaaagagaagaacctagatatgtaaataaagatgaatcttttagacatgtagtcagtagctttcatgttactaatgaaaagttcttcatatcctatgatttgaaagaggaaaatcaagttttgtggaagaaaatacgtgaaattttaaataaatatacggcaactttatatagccagagttaattcttctttttcagtaaattgtattaccctgaaacaccaaaatgtcaatagtacaattatggtcatattgagagcacttgttattagacacaccctttagatttttttcttttgaatagaaactgcaagaatttttaaaaactgggcttattgactggacgaagggttttaaaaagaacagaaagacaaggcagggcaaatcctggtgtatttcacctgcgtagtgacatataggaagaagggacctttcagagatcatcttgagttttgactagatgataaaactgaggttcaggatggcacagaaaagtgtccaaggtcacacatttaggaaaatgtgggacatagacacaaattgtttgatgtagttcagtagtctttttagtctgacccagagcctttggggatggggacggaaggagattgggaagagcttgtcattgattcagtatctctgctcagtgccctcttgaggtttttgtttgtttgttttgtttttgtctttctggtatttttctgttgttttgatcctggatttggagtacaaagagactaaaccattttccatattgcatacctgactttgacttacactaggtgcattgaatgcaagaagcagttatgtagaaatgaattaatagataaatttactgtaaatctagacctttattgttgttcctcctatgctactagttagctgagtgatcacaggcaaattacttaaatcctcataggctcagtttcctctaatttaaaaggagagtgttgggtagttgatctctaaagtcctcttcagtgcaaagtgctgtgcttgcccctctttacctgaataattcctaagattgctgaagcatcattatctccttgttcttagctactgattgtatatttaattccacaattgggtttatctctattttcattcatgcatctttgtatcattaattccgaagtctcatataaaatctttaattcaaaaaattgagtgatggtacaagaaaagcaaactgcctatgaattccacgtgattgtgcccctatttacaaggtataaatgtgttaagaacttaaaagtttttgagtattgattattgttgccaagtcgtcaagacaatgcttataaagtaatccattatccttttccacactcttttcccttttagaacaaaaataccagcaagaaaaaaaaggatgactgttccaggtcatcaagaaagtagactacttggtcattatcaaaaatattttgaacatgtgggcactttataaaacaaagaataaacaatagaaaattatgtacttagaaagtccagactgttaataattttctgcacttaacacagtaagtgggcccacagacattaaggtactaaatgatttatagatgaatttattattcagtttcaggacaccagcagcaataaagtattttctacttttataaataactcatatggaacttttatctagtgatacactaactcttgtgttagaatgtgtaaagaaaatattttataatgcaattgtacagtgttggagtgattaggattcaaaccttcaacttccaatgagaattttaatacttagtctttaaaaatagtaaactgagatttatatttatgttatttcataccatcctatattccataatcttctataacatgattttatattcctaccttttattcaaccattctcttcatattggacattggctgtttttaattgttttaagataagcatacttgaaggtcaatcctggattggtgcattaagatgcattctcagaaatatgatgtatagagttaaagaacattttaaaggtgacatcgtgttctgcttttcagagactgttagcagtgtgcttgtagcgtattacactgctgtatcgctgtatcactgcaccatctcaaatattgagtttttttatagttaagtatttataaaattaatatgttggataaaatctaatttatctcaattgattaacattgaggctgcaaatatttttatagtgtaaaagaattttctattgtgaattgtacattagtgtcttattgagacattaacatttcctgtctttgttgttgttgctgttgttgttgttgttttgacacagagtctcattctgtcacccagggtgaagtgcagtggcacaatcttggctcattgcaacctctgccttttgggttcaagcgatcctctcatctcagcctcccgaatagctgggactacaggtgtgcaccaccacacccagctaatttttgtatttttagtaaaaatggggtttcaccatattgcgtaggtcagtctcgaactcctcacttcaagagatctacctgtcttggcctcccaaagtgctgggattacaggtgtgagccactgcacccagccctttctccctcacacttttggaaaaaatatttttctcagtttgttgcttgccatctaatttattacattgctttttaatatacaactatagacaaaagaatcacttttcttttggaaaatttgatctatgactttcattcatataaaagctttcctcaccctcaggtcaatgttcacctttatttttttctagttttttttaaactttgtttttaatcactgtgaaaataattgaaagatgatatttagataaaaatttgtgtaaagctctactattttgatacagattgaaaaggataaaaagaaatgagtaagaagtatgcgtagtgtttagaatgaacatgaatgataaactaataggtattattttacaaattatagaatattaaagataaatatactctagagtatagaaatatattttatattattatgttaaaatattaaatatttcaggcatgtaaaaatagatgatagtgtagccatttatgcatcaaagagttcaaaccatacaacactaaaggtaaaactggggcccctagtgtacccttccccaattctatcacctttccttcccacccagaggtaactactattatgtgtttacttttcttgagtatgttcttgaataggtgtgtattcaaaagagacagttcctttttgcactttggaaaacaaataattctgccttcccccccatgattgcattttatatgttttactaagatatttattataataaatattacaccacttttctctgtcctattcatggggaaaggaactctttttgttcaaaatttgtcattcttatattgtactgccccatattctgcaaatctgacaacagaatacattgtatgacaaatgtgatgtttggtacaaatatgtcagcttatgtatgctgttgcatgtgttgctcagcattgcgtgtattactgagcattgcatgtatcacttagcctgtctataaaaaattgagacatttatttaaataataattgtcccacaatctattcatgtttatgcatgtggatatttgaagcaaaatatgccatagaaacagtatctcttgctcactgaattttaaagtattttaacatcagtagcaagtgcataataaatctttaatgtataatacgaactgatagaaaaatagggctctgcatattttttcttgaaaaacaaatgtgttttgagaaatatagctttgtctaatgctgcctttgtaaaaccgggaagtcaaaagacaaataatattttgattctatatgttatgttgattatatatagtatgtatgtgaatgtgcataactatatggattcatatatgcacatatatacacattcatttatactcatgaaaatggtaaaaatccagctaatgatttaaacattgggtcaatagcaatatataaaaataatattaaacattcagatctttgcaaaatctaaatgggcttgtttttaattttcatgtggacatttgaaattttatagataagactaacaatatgttttactgtactgtgagaatttaagattaatgaaatattatgttattaatttcttacatttgtaaagttgtttttcacaataccgtggcctattagattgctaagaaattatgtatgtcaactctttctttatacaaatattgaaaatgatagtaagattaaggaacttgcccaggtcacaatttttttctttcaaatttcatggctgatttctaggcaaaaatttcaggggcctgtccaatacgcatgaattaccctactataaacaaagctagggaatttaatacataccgaaaggcattttgtaatatatcagaaactatacaaaaccaagaatagtcataaaataacattttaacatttttaaaaaaagattattccaaatgccctcacttccaggaatgcgactttaaaagcctaggctttatgttatgtcatcaaagtcattgtactcaattagacaatagtgctataattaattaaatgttattatgtaaatgcagaattaccaaagagaatttcaaagagtataacagtattaagtcgtttccttagtaatttctcattgctgtgaaaaacatctgtaacctaatacatttatattcatttttcatattatattatgcacatattatttttaaatatttgttaacaggtaattttctgattaccaaagtaatacttttgtattaaatgtttgaagactgcctccaaaaattgcaaagaagaaaattttaaaaccgttataatcctacctttgaaataattattcttcaaatgttagatatttggaatgtttccaggtgtttactggtatagttaatgctgctgtgaacatctttattgcacataccttttaacctctgtggaactgattgcttctttcatgatttctcctatattttgtcaatcatttcctttttttctttttcttttttttttgagacaaaatctcactttatcacccaggctggagtgcagtggcatgatctcggctcactgcaacctctgcctcccgggttcaagcaattctcgtgcctcagccttccgagtacctaggattacaggtgtgcaccaccatgcccggctagtttttgaatttttagtagagacagtgtttcgccatgttggtcaggctggtctcaaactcctgacctcaggtgatccacccgcctcagcctcccaaagtgctgggattataagagtgtgccactgcacccggccaattgtaagaattattttcaaaggaatttatatcaagttacagtgccccagaatattctgttattttagctgtattgaatatcataattttcttaacatgttttgtctttagatggtataaaatactatctcaatattattttccatttgtttgtttaccctttatatttccatttgcttgaactctctgctggaatctttcaatatctacctgatgaatcaatgtttatctgttggtttgttttctttttttttaattaattaatttattattattatactttaagttttagggtacatgtgcacaatgttatacatgtattttatttctttttgtcacataaatttgactctttattttaagcaactatttctagtcttttgtttctcttgttttattaaatttttattgtaaagaagttttgttttggccaggcatggggtggctcacacctgtaatcctagaactttgggaggccgaggcagatggatcatttgagacgaggagttcaagatcagcctgaccaacatggtgaaatcccgtctgtactaaaaatatttaaaaattatctgggtgtggtggtacatgcctgtaatctcagttactcaggaggctgaggcaggagaatcacttgaaccagggaggtggaggtttcagtgagctgagatcgggccactgcactccagcctgggccatgaagcgagattctgtctcgaaaaaaaaaagttttgtttctgtgatagatattttgcttagcatgcttgctttttatatttagaaaaactaaatctattccatctaaaatatattttggtgaataacgcaagatatgtaatctcagtgttatttataaaatgtaccattctcactttcttattttgtaaagcttgtttaatttcagagtttgatatattgaagagtcctattccactgacttaaaaaattgaggcagaaggatccccctcaagtgtcacatcttagaatttgtttgatggtacttcaaggcagttggtgaataatttagaactcaaactttgggctgcagattgcctgaatacaattaatagaaaacaaaatatttcctcaaattacattctttgacattagtaatcattcctttatatacatctcaagtctaaactcccaatctgtttatatgcagagattcacagctttaagatttatgtttcataactgcaatatcactctatgatacattaatgggattctgtactcaactattccattggcattcaagtgaataatttttatacaaaacttcttcaggagacaggcccaactgaagtgtatcactttaaaacaaatatcctatgggcaatagataaatctgatatttttctgagtagaagaaacataaaacctcaatataggattaatagggttcaaggggttttataagcacagtgcttgtgaaagtatgtaattcctattaaggcttgcattcatgagcacatcatggtatatgctctctctgggaatatgtaaagccagtttaaaattcaattacagacattgcagtctagacctccgcaagcctttgcacgtgactggactcactcaggttaatctctgaaccagttgtagagagcttttttcatctctccctcacacatttccaaactcttttctttctgtgttttttaactgtgacttttctttacaaaaggaaaagagaattttttttaagtccatgacatatccaatgaaatcgaaatgatttaatacatggagttatcttaatatcttttgcttcttgacagttctctcatatctatctagaaaatatctggccaaaaaaacccactttactttgtttatgagatattagattattttgtacattttcacattccagggctacaaggagaccacagtagacaaaatcaaaccgtcttccttttctttataggcttgtctcagcaatgcagcactgtaatgtctcttacttgaaggaacttcattctattgtaaattcttaggacaaatagaataaggagatagaagagttgtgtgagttataacttatatgtaattttctgtatatatttggaaagttcaacatcagatattgagtctatttcagtctgttgctgtgaatagaatacactattttatcctattggttcttttcttaaactgtcaaccatggtttgagcatagtttaagaaaaaaaaaatgaatgctttaaataaaaccagtacctgggttggaggtggcaaatatatacaaacctgtgtatgtgtgtttgggtgtgcgtgtaatctgaggattatagccctgtatctgtttcagggagaattttttttacatcagaccatgaaattgaaaggtgattctgataatctatttcattaaatagaagtttatgataccatagactctggaataaaaaattccttaaaattccctatttagattaatgcagatttaatccttaacccattggttcaaaactcaagtttactctttcagtaataacaagaagtggttgtcaataatactctcattaaaaataattatttcagcatttaaaaagtaataaaattggtattttctaacttatatgcttaatactcatccacaaaggttaaataattaagaaattaaagactgtgaagaagaagggaagaaagaggaaggaaaagatggtaatatggatgctattaccattcacaaaaacaacattgatgattaggcatatgttgacatttcaattttttgaatcttggtaaaatagtcattttaataacatacttaccagattacttaaagtaacatttcaactctgtttcagcacagcagataacattctaatccatgtaatcataagtagaaaaagcagaaagaaatagaatcctaacactttccaagcttccttctcttttgttagattataattcatgtacatccttattggggtatgggagacactggaacttattatactacatctcatccatttgttctgtctccatgactgacttctcaaaataatctaaactcttcagtgagccctttaaagtcatggttttatcctatatctgtccaggattttatctcacgttttgcatgtatcccagctcaaaaggattacttttctgaactttcattgcccttggattttgaccttccatatacttgaaattctctctttttaatatcaccaccaataaaaatccatccctcaagacctcacccaattattatttcaaactctaaatgctgatcaactatgtggagctgaccttttcatcctgtaaataagtgttattttctccttaagggatttgccacatgaaaactttgcaaacaaggacagtgtcttattcattttgaattctccattgtgcaatttctagctcactgtcatacagaacattactatcatatttagaggctgaataaatcattaaatggataccatcactgggcccatggaattgacttacttaactcaaatccatgtgaaagtcacttaataaatattaaataccatcaattctcaattattcatggggttattattcacaacttacttgtgatatgtccttaaaggtcatatttacataatgaatgattctgcctatttcattggcataaataggttcatttaaacagatttcattatttaattagctccaatttttcctttaccatctttttcagaaggcaagattttgcttttagctgtcttgcctaaatctgaaagctcatactgatcatttccatttaataagggaagatgaaaagggccggtcaggggactgggatccaaaaggtcaagagttttccattccttcttccatcagatcttcatagtggagttttgttaatttgtgaatttagttcaatgagccaaaaaaaaacttgctgatcaaaacaaagcccctttggtagggaggaaattctgtctctttgttttctcttcctttctctctgtgcgtgagtgagtgtgtgtgtgtgtgtgtgtgtgtgtgtgtgtgaatgtctcctgacatttgaaattcacagtgcaatttaacaataaaataataaaatatagctttttacaaaaggtgtaagcatagattaatgtacaggttttcagagaaggacaggttagcttgcttcatttttaatccttaggtaaaacagaggaagaggaaagtgaattttattgaaattcacactatgtacaatgaattacaagagaactataggaaatggttagatatgattaaataataattattttgaaattaagataaatgtcaaatgggaattatttgctttttcattaggaactgcaatgatgtttgcgcagcagtgatctatctagacagattttggaagatgtcagcaattttgtttagtctgtcagcatttgcagtggcaatgattgggatttacttgatgcattcactctggaaaaaaccttttgtgcacattagcatgacaactggtgtccatgaaatacaagaacaacattcagttataatgcactttacaccaaattaatgaatagtttaggaagggaagcaagagctgacttagatgacttacaaatatctgcttttttgcattttctaaggtagataatttgtgtatatttactttaaaaagtattttgtaagcaaagaaatgactgaaggaaacattaactccaacaaaacctaaattaatgtgtgtcaatgtaataaacttaggaagaaggcggttgcttgaaatattgtagtctggcaccagctccttcaaaatggccatgttttaaaagtatggcaggtgtgctaaaaagtctttattgcaaaatcattagaaagtctttttttgtcagtttaaaatgcattcagctataagcaatagaaaactaacaatggttgaatcatctaagggtttgttggtcttgtggaaaaggatatcaggaggtagcaaactagggctagtacagtgattctatgataccctcaaatatgtgatttccttttattctttcttctgtgccagccatcctcagcatatgggcctgtcctgtgcttgtcatctcacgaccattggcggatactgcttcccacggcacwatctcctcattccagggtaaaagaagagaaatggaaaggaagtaggaagggatggtgtctgtatcagggaaacaaggatttcttaggaatcctcagcttatataaacccagctaccttgcccctctctgacaacctgttctttggcaagaacaatttcatatacttgcccctaccttccagggaagctgaggagcttgttttttttaactagacatattattgggtgattaacattaggcttatataaataagaatgaaagggagaatggatatcgtatatacaatcagcagtgtcagccacagtcttatagttaagtggacaccactaaatttggtgggattagaaaagcaattagttggtgagatataaaaagcaatataacataagggttttcaaacaaaatatcagatgatattacctgtatactattatgttaggggtataataccataaatatgctaaattcagattaataaaaagtttttcactttctgcacaatcatgacctccttttattaaaatagacaaatagtctggggttagtcacacaaagtctatatggcacatgactacaataattgatctgcaacctctctgttctttaaagtgattctgtgatatcaaggagtgttgaaattaaaccctggaagccacagaagatgccaaatggacacattttgtgactatttatagctgatccaaaaatgaaaggggagaatgaggaaactgattgatagtccccaattctgttttgatctgaaatagcttgttaaatgaatctcattgtcagagctagtttaaataataaatgtctctactctccactattccgtgcatatgtgagtctgaaagtaaaagtttgtaattaaagtgactgcattttaaagtttaaaaattgatctcaactaatagctaatactaataaaataaataactgcattctaattttttaattaccctggtttggaagcagaaacatgttttgtacatagctgtaatgttatttcactttaacctggttgtccccagtttagtatctacgaagctttgcacgtatcggaactccatacctgcttctcccttggtttctcttctcagtgataaaggatttgacttctttcttccccattccagcttgcacattcctgaagttttccggcttggaacaaattatattactaggtctgcagtatcatttagattgagaagtattgtgatagagcaaggttcaccctaagtattgactcttagaatctgctcattccatagtctgttgagtgcctttacctgtcactgttgtcctaagcaccaggagtgtagcgatgaaggatttctagtcctagttatctaaggactcacaattaggtttctattctggggctattttgtacatttgtgtacaaaagactgcatttttaaggtgtctgacttttgacttggtttcagaaggcataagaagttggtttcatggttacaaccccatgcccagaaaagttaagagtggtatttttaattaatttgtaactagaattaaatatagctagaattatataggaatacaacaaaagattaagatgtatatacatccctctgaataatataaatattgacaggctgatattgggttttctagacttactttcgtaggtattttcttagtatgaagatagttaaaatatactaagtgaaaaaaaaatactcaagtcactgtattagtggttccactagtaaaactacagacctcatctgtttctggaatttgcaattttaaatattgatttttggaatgtggcgacttacactgcctacttttagtttgccaggtgagctcatttttgaaaatatcctatactctgcatttatcctttgataaaatcatggctattataaattttaaaaatggtaaagatcatgtcagaataatgaatcgtgcttctaatttgataaatgtagcttaatcacaaatatacgaaactttctgttggtctggtgcaaactttctcaaggagaagatttagtgtttcagaaccattggagtagatgctatattaaacattgaggctctctcacctttaactttataaagctaaatatagtcaacaaatgaattggaaagacatattagtaaaatctaccgagtctaggcaggcctatgtgtcaggccaagatgcttcctggaattattctgttcagaatgattcctctttctttctcattctctaaagataggatgtcaacagtttcttcataaatgtaaggttataaaccatgacatttgtgaaactattgcaataatcttgggttgtgtagggataggatgacattttcagaggaaattctctaaacactttcacattaataacatctgggagccataatattataagcataagaagtggatctcatataaaaacataaaatatttttttcacatttatatgaaataacatatgtacttgtaacaactgagagtccctgatcaaattaggaaatctacagccatttattttaaatcttgctctaccaaaattggattgagagacaaattaaacacaaatcattagttacattttataactatagaggatgtgcagaaaacaaatattcaaacccaattttatgtactatattgtgccatatagtcacaggaaatctgttttccttctaaattattaataatttaaaatcatgaataattgtttatgtaagacagctggccaggctattaagggagtacagctacacagtaacaccaagagtgaggtgtccatctgagctaccacatggagaaagagcagctggctttgccccaccatattcagttgaaagctgcttattactgagcatttgaataacttgaaaggagagaaaaggaaagaacaacgtcagggtagaatgtttacttgtttgagcctcccaggagaaatgccatacaaagatttgacttgatttttaaatcaaaccaaagatctttcagattacattggagggctgaattgaaagttaacattgtataagttgtattatttttatgttcttttgtattatactatgttcccttttatattatgttcatattaccatgaactttagagtcgggatagatcagagctcaagtcttaatgtcatctcttccaaactgtgtgacctgggaaagacatttaacgtgtctaagcctcaatttcctcatctatcaaatggggataatatgtttactgactacaaattaagtaaaataagacctacaaaactgggtgctactgtatgataacacaacagttactacagatgctattattattaggtcacgtgtgtgaagagaaagtaaaaagaagacaagatgcaaagataaagaaggcaaaatgcaaagatcctatttcaatgaagccaatagtagtctttcaagttgctgttccttcttatttctcttccttccaataataataattcctattgtctaccaagtattgagagcctgtcataggtcagacacatggcatgcattgagagaaagagaattcaaattattctcttgaacttttgagcaactctatcaatgggtcttatttggttccatgttactgctgagtaaaagaacatgctcacagagggtaagaaacctgcccaccagcaccttaccagtagacattagagtcaggactttaaacaggcttttggactccagaaaccatgctctgcctactcaaatttagtagctgttctgaggatctcattctcacttatttccccttttttatttgtttgtttatgttctaaccactgatttgaaacaaattctcagaccagaaatttttactcctgtggaaagagtaattggatgttctcattacaatatttttttcttcatgaatgtaatcaaacatcagctggaagcttgcttttaatgcgtggataaaccagcccacacattttattttccctgaggcgtattgctgggaaaatctatttctgattttaagaaatcaacatatgctgaaccaactgtctattttcatttaaattgacaggagctgagactcaaaaattatgttgtattttccacttctaacattgttgatagaaaagttgaggtaaacactttattctgccttagatgcctgctaaattagtctctctaagtaaaaatgtcaggaggctattgttggattaatttaggtggagttgatacagttttagggaagaaccgttctacagtatgagaacaacttttaatattatgttagttataatctggagcatttatcataccttattatatatcgtatgttttgactttctcctctattgggctgtgggctcaattaagataagaatgtatctcccttatctttgtatatcggtgcttagtgcattgcctggcacatagcaggcgctcaactctgttgaattaaatgatcaatgagttaaactagatggctatatagttgatcttctatatagttgatcttctatattcaaaatatagtttacatatatgtatgcaagtgtatatgtgtgtttatgaataagaagaactatatcttcatactgttgaaaagttatattgtttctcatacagattttattcctttagctaaagttgtatcaatattaaatttataactaaaacgatattacgttggcacatgagggttttagtcagctccagctgctacaacaaaatactataatctggataacttacacaacaacagattaattttctcacaattctggaggctgaaagttctgaaattagggtgccagcatgtttaggttctattgggggccctcttcctggcttgcagtcagtgccttctgacatggtggagaaagagcaagctctctggtgtcttttcttataagagcaccaatcccatcattgcaggccccaccctcatgatctcatcacctcccaaaagacccatctccgaatactattacataaagggttagggcttccacaagtgaattttgaaggggacataattcagtgcatagcaatgagtatcttgtaggcttatgaccatataatttgaagctatgatttatgtagaagttggacaaaaatgtttcacataattagttatgttcacatgatctaatgcctgaaactcatttttaaatatgcctgaaactcatttgttaaaattatagtgttgggaaaagaagcatttaatatttgttagcattgaacttaaaaaaaattaaacacattgactttagagaaatgtatatgttgaagagtaggtgtggatgaaatgaaagaagagagctaacccttctcagtgccagacacagtggtgtgggcattaataattcaaccctcatagcagtccttagggtggtcttaaccatttcatggggaaattgagactcagaagtttactaatttggccaaagtcacataattgtttagagactgattcaaatcaatgtcttctttattccaatcaatcttttagggaccttatctgttatttatatgaaaaaaaacaactaactttaatgtttatggagtttgtttaattaaataaagcccttaggatttcaaattgtttcctaagtccaagagatcccaatgagaaggaacacaaagtaatttttaatgatttaaagtaaatgctttagactgaaatggtagcttctttttaaataacatttcaaattaggtttactattaacatttacaaagaaccagggctataaatcaactttatatgcagtgcattccattgatcttaatagttgtatttgcaagctgagtagaagagatttacagttctctctcaagggatagatctccttttttgggcaatgaatatactccttcagaaagtcctcttgctcttttacgtactcttttttgcttggtatttcaaaggctttttgttatactttaaaaatattcaacaaaaagtcactgaatatctacaatgtgtttatatcttgggtgtaatgcctaggttaataagatgcatagaaatatggacccagtgctacaggcccagcagtgagcaaaactcagggaaacaagtgacactaaacagtgtggagaatgcaaaggctaaaggctatatgagtcctggcatgagcacggaggtatgggctgagcagcgctgcctgaggaggtgatgtacaagtgggtatttatcccccccgggcaaaccagaaggaaaggtaaagccaaggaacaaagtagacaatggagatggtggggaatggagggagaagaggaaagaatcttggagagatagtcagtcttaaggtccaattaaactatttcatggcagccattattatcctgaattttatggatgaagaagtgaggttcaaaaatattacataacttgccctgtgtgacaaaataaatgaaaagcagagccaggttcaatgaaagtatgtttgacttaggttttaaaattctagtcataaatggcaatttaatgttgttatatatttgtattgggcttcagcaaaaacaaaaataaaacctcaagtacacaaaagctctagtaatagagccatgtttgtgcagttatttccagcaatccttggaacctccaaaattctcctcagcctgacattatatgccctatgtgtcatttcattatgtcaccacctggtggtgcactcacacccactttgggagaaagggggttagagaagggaggacatctgtggacaagccaataaaagcatttactggcatcgtgacttcataatttacacttttatttatgcataattaagtataaataaacaaaaacatgtattttctaactgctacctgttctgtttccagtcttgcttgaaaatcatctttctcaaaaaactacctatcatgtgctatgcccattacctgggtgacaaaatgatctgtacacccctacaaaatgcaacttagtcatgtaataaagctgcttatgttccctctaaacctaaaataaaggttggaaaggaaaaaataaataagataaaaattatctttctctatcagagtaatttgacatcttgaggaagtgatcctgggacttcatattctttaggattcaggtgtccagataatcccagaagtagccagcaatttggccatttggggtgtagaaaccttcatacctaggttattgtaatacctcaggctattctctccaggtttccagtgattaattagctgtgaacctcaaccaacacctgactctagaagagtcttcaaataggtcctagaaggaccaagtaaaatcaccatccctcaatccctcaatttttcctttttccaagtcaagaataaaagaagtctgggaaacattgccaggtcagcttctttttaagctcatgattttctgctacctgagggaaggagagaaggaaaaagaaaagaaaagaaaacctcaatgaatgctccataacctggattttaatctctctttccctttttgggataaaattgtttaatgtaattaactacaaggagaaaagttaaccagtggcttctgcttttgctgaaagcactttttcaaacccagctgtcatgtcaaatgcattcaatattagtttggacaactccttacgtgggtctcagaatgcatctctaaagaaagtgtttaaatattttttaatgtgaaaacccatatgggtattttggtgataggatttcttctatgattcaggaataaagtataatgcccaaataggcccttgccattcctatcagggacattgcatccataatccattttccatatccgtttgtatgtaaatgaaaagtctcacacatcacaacttctgtttttctcattgtaggatcgcctcatctgtatttatccacattagtaaaaattatccaaatcccagaaatataacaatagtccgtatttcttgagcatttactctgttctaggctctgtgttaaatgctttgcatgtaatgtctcatttagttttaccacattctatgaggtatttactctccttttcttatatgggtaagaaaacatgttgagttattcaggtaatttgcctatattcacatactggtcatgagaaaactagaggacccaggagattgaagcccatatttcatcatttgactgtcctaggaaacgccttgtatacttgtttttttaaggtattctgtcacccaagaacattgaaggtatatgcagattctcttttcctgttctattccactagacctgaatatgagggatgaaaattgctttggttttgatgtgacttcagtaccttctgtatttgacacagaggtgagtcacatcctgatcagtgttgaaagcatttagtaagattattagtttataaagaaggctgaaccatgactatataataatgaagcaattgtaaaaaaatcagaaagcattcacattcattccttgaatttccaaaagcattcaacaacagaaaaagggcaaacacgtttattccatgtatatatactgaattcctactatgcaccttcaacaataaaggcttttggtatataggagtatactgagcccagttagattcaagtgaaattcctagtaatgtcctggtatacaaggagcttaaatgttcaacatataacattgtttcttatgataggtttcacctataagccctctaaactgtttgtaactctataagaaataattaataaaccccaacaaggtctatttaatgtcttgagacagatcattctactcactttagatttcttatagataataaccagcacctaaaacaatttttaaagacataggaaatccagaataaatataactatcataggaacatggaaagaattaaagaaatggcagaagttgggaaaaaaactactggaggaaaagggtgaaaatgtgtgacaatgaagatttgcaaaggttctagaatactttaaattaagttagaataaacttttagttgcactgtgctttgactttttattcagcctaaattgtccttttaaattcaggttgttcatctccaaggatgaatgtaatttaactgaatcttgtattagagacttgcacatttctcactcattaatatgatcaaaagcatcttatttatgtcaaaagacgagaaacgaaggccatttttggcattgtcctaaagttgtgctttcttgccttattagcatttcatttcaagcaatagattgaacagaaatgcttgtgattgaatgaagattaattatagggtatgggaatattcaaacctttttaattgttctgagtagtgtcttctgctgttttgttatccaaaagggagtaagtatttggggaacaaagattgtgacacatctggtaatattcaagatgcacaccccctcactagactgtcaaaaggctgggcttgtcacagatgtcgaggctgtgatgtattgtcactcttgctgcacccatggatgcgcctctcctgatatgcgactcccattgggaatgtgaagacacagaggagatttttaatcaagagcataggtaggagtcaatgatgcatagctggcagatgcagatttcagcctgggaatatttagaataatttggattgctttatagtttatagtagcatcttttatgcaggactctgacctaattatttcaaaaattattgctactgattataatctcattgttgctttcttttatctattcattgtttaaacagcatttttagggggcagggtagggagaagcagtgtagcttggtaataaagggcatatgatctggacccagcctaccttggaaaatgattaagccccaattttcctatatgtaaaatggagacaatactagcatctacctcacaatattgttgattgaatgaaatgagataatataagtaaattacttccagtagtccctagcacataagcactcattaaatgttagcttttaaaattgtattccagattaacatgcctaaaaactagggctacgtactgagaattcatagaaccaattttactttgtgtctgtgttcttatgcctgcatcaggcattacgaagaatacagagagacaaactttctattcctcagggttgacaatagaagagaaataataatacacaggaaataagtaaaagtataattcaaactccaagtttaatgatgtataaaatgaagaggtcagtttgggctataacaatcagataagattcactaggtgctaaactcgatctaaactgagaaaaatagacaagacttataaatattagtttaaaacataaatctgaaagtgttactcccctatattttagtaagacttctctgtggcccttgctcctataacagtttctttaaggttaaaactgctgggtttctgagctcttctccatcctactaaatgagaacctctaatacaagaggacagtgcttggaaatctacatttgtatagaacccaagtgattcttatcaagcaaataatggaaattctatcttagagaagtctaaacatactaaggcccttgtttagactctatgtaatttcattttcagccactctgggccttgacccctgagaaccagcaaaagagaactttcttcagcacttggcttagccctcccctcttttgtgaaggagtttcccttcactggtcagtgttccttgtctttaatgatggtcttgaacaccactatgttgttgtacttaaaacacagagttgtaactgtttacaggtttatatccattaaaccacttgatcttgtgtttcatgctctcttattctcaccttagcatttagttaccactcactaaatcagttgatcttgaaactttagaaatcttacccttacctgaggggtccttgtttacaaagcagatttctagatgctcttgctcaggtactcttattctgtagttgaaatgggcattttagggccagacactttggctcatacctataataccaacactttgggaagctaaggcaggaagatcacttgagtccaggagttcaagacaggcctgggcagcatagcaagaccctctctctacataattagcctggcatgatagcacatacctggctactcaggagactgaggtgggaggattgcttgaacccagcattttaaggctgcagcgggccacaatcatgccactgcactccagcctgggcaacagagcaagatcccatctcttaaaaaaagtgagcattttaacaagtgtgtaaatagtctaccattctcttaaaacacacacaaacatacacaccttgaaaatgcaaatgaatgaatgtgtgacagagtggaagaaacagcttcagaagggagaataaacatagcatttacagaagatagtgagaataccactgatttggtatgttggatgctggttgggagaattttatgggaaaaataccagttgagtgaaattatggatgttcttgagaaatagcagagtttgaattgaatgtggctttttgcataaagtggtaattttggaattttggaataggagaatgaataaagatggcatccccaatagttgtcatggctagtcttaggaagggttggatcagatgatctctaaaatatctcttaacactgaaatgtatagtgttatgctataaaatatgtagatattgagttgtattaataaagccttagcttgtattcatgggataaaacttctacttaaataatattgtaatttcattcattaatgcatgtgtataaaagtggatcagtattgtggaaggtttgcttaaggtgagatacatgcaatggtagcctggagccaggtagtagtaccagctcaggagtactaactgttacgtattcaatgattttgagacctggttggaaagcacaggcattattaaattatataaacccgtaattaaataaattatatgaaatgcaaaggtaatcaatactcaaaactcattagttcccaagtacttcattatattttactattatccatgctcttgaggttatgtagtccatcgtatctgtgtcgtggaaatactatataatgaggtgcagctacaaatctcttcccaactccacattcagggccatcacattggtagcttgaaataagacatgctgatagtagttacaccatggaaatggacatactgcacaaatcaggcctttttttttctcctggagagccaactgataaatatttaccagcataccaatggctcatgtttagaatagtcccattgttttggggtagaaattcattttggtacatggcctgactcaaaagttcacccctttagtgttacctcctgttcagcattgaagccacttatgtctccttatatgaaaccagaaacaagaggctttttttttttttaattctaagagtggctggctttagttgtaacagaagagagcaggtacctttattgtacttcaatttaaactcctttcaaaaggatctgagaactttttcaaaaaaaatttattcccccaaatctgataaatatgcctctattttacaatcttttacaacttttcaaattactacaatctgaaagacattttcaatctttcttgaaagacagggagaatattgccatggatgaagaaaacaatgacttgtttctttcattgtataaaatcattcttcatcactgtgaaaataagaaaatgaattttttttagttgagcacaatctcgagatctttctaacagcctctgttcttacagtatggatgttactcttggtttatagctctgcaaaggagtcaaagaatcttccttttatgagggccctgaagaaagaaaattgtgctgataaaattactttatgtgcgtttgaatgatgatatggccaagcattcttcagaaacttctgaatttttcatgtatgccttcaagagttgtaatccttacttaagcaaatgtctgtttaggagagattccagagattttcctatttagagtgttttaaaaattaaggaaggtgttcaccagcttactagaggttccttgtgaaaagagaaatgagttttcttcaacagtcttatgtctttggttcaagctgacataattaaggtgtaaacatatcagtatagtttgttttgattaaactttagatggacatagaataggtaatcaaattcattggatcgaaataagtattcttactctgaaatgaaacaaaatggaatcttcagaaacatggaaacaatgacccaaacatcagagaggcattgaagataaatgggaatatcactgggaatagtgtaattggagcagtgttttccaagcccaatcctcagacctctcgaaaatggagattgtaacactagattgtgggcagtctataccaaaccaacagtactgaatcagagtgggttatgggaatggctagagcatttgcaattttacagcatattcagaagatttttatgtacactgaagttgagacgtgctgatttagcaaaggtaactgacaatttgcctcaattccctcatctgcaaaatggggattataaaagtagggttgttggaggactgaatgagtacatatatgtatagtgtttaggacaatgtctgctgttttacagtaagtgctctattgttggctcttgccactattattgttttgtcaagggcttgtctgtgctagctggaatggaaacttaaatgtttctaattattgcaactgtcagatttcttaaatatcgtaatgaagccagcacagtgaagagctgtcctcagtttaatgtaacattggatctatcctaataatttttcttagtttcctattgcatttgtaactattttatttaaatgttttatttttccacagggttacatttattttattacttcagaaatattagatgtcattctgaaattgtggctgtgcctttatcttgcatgtggaattcaattttttatattctttacaaacagtatttataagaaataaagataaggttacagtgagttgtagtatgagatggtaatttacatggggtgctccatgtgcttagcttttctctgaagttatgcatccccacagcaagggaaatatttgcatttctgagagtgagaatttatgttcatcctctactaggaatggtggcagcttttccaggtcaaggccctgcagatgcctgatggtcatggtaaatgaaggctggatgcagggaaggcagcaaaatgagaaaatctcctgggatcaattaatgggagtcatctgagagagaataaaggcaggagaacattttcttctagtcaggaattcgcatcagttttgcctggtaatgggtttcatgaaagccaagatgaaagggttttatccctaaggaaaaaagggctctcctcacatcctctttctgtgctcttttatcaatgactaataataacatgcttgcatccatgacaatctttcagaaaactgatgcaaaaacaagtccaaaattagagtgtacagctgtcgtgatttcctggagtttctggtgtgtgcttagtaggcacacagtttgagttacatggcttcattatatgattacacactactttgttgcctcattggtggttaaggtgattttaaacttttcagtacccaaaagcagtgtcctggaacataccaatgaagacggagaattgtttcagtcccagagatatcccaagcaaatacagcagtgaactcaatggatatttgtgaaatgaataaataaatgaatgaatgagtactactgtgaatattcttgtcatgtttgcttgttctcatttggagagtttctttgaggtccgtgaccagaggttgaattgctggatcttaaagtaagaggattaccaacttccctatacgatgctcaattcctctccacaatggctatactagtttactgtctggcaatcggtgtatgagggttacctgtttatcacattgttgtaacatttgattttgtcagatgtcaggttctaactgaggtccaaggggagttggtgggcaagtggcgggtagctggaaaaacacgtgaggaactgtagacagtttcaacatggatttactctctctctggccatgagccatgagcgcaagatgtatgtacagcgtcagcagcgtagttgtaccttttacagacaatagtggctccaagccaagcacaagcttacatgggtgatcacctaatgtgcctcacgtggcgtggttacataatgtgcagagttgtgagcctgtgctccaaactcactgagtcatgctggaccggatgtctgcttcggcctatttttgagagcagcacatccattttccttacactccaccctcaatgccaaaggagacacaggccttggacacacaggtctaagacacaggccttatacgtacactctggggacaaaggccctggacacacaggtctgacacataggccttaaattctactccctaggctgaaggagtcttttaaatggagaaacatgcccacagggtggaaccccagacccagaggccacagcagtaatacaaggagcaacaactccaggttatgacgggcaaacaccccatgatgatgttacccgaatttactttatgcattaagccaggtttttatttccctacctttaggggcattggggcatgcaacaacaggttaccatccgtttccatcctggtcataggaggtcatccttcctcccataggtcttgccacatggcctagccccacatgggccagtggccaactagccacttctgtattttccaggtgcctaaccacaaggttaagcctcgatagaccacacagctattggtgcagattatcatatgtgtcacctctttggtgatcaccattcatattgctctgacttcagcccattgactactttgtccatacccggtatgaaaccatatggagtcagtactaggctggactgtgagcagtccaggcagtagcagcaccccagctagacccatctgtgtaccgtgccccatcgggcatagggggggatgcccttccttaaatggtgaaggctcagcatgtaggggtgcttcaggccccatgtccttaggccccatggccttatcttgcattaggactgctggtctcaagacctcttgcaactctgctgctaagggacttgtactcagcgtactctgttgcttcaagtaggtgccccactttgctaaagtggatgtctgcactgtcccagtccggggggttgttatcaatgaacacatccatcctgctatcaggtaactcgtctacacgacaactgtagcctgtcctgccatgctctcatgagcccgaagggcagcatatgcagttactaactgcttctctatcagtgaatactggagctcagcttctttccatagttgggaccaaaagcctactggtgttctcaagcactccatgctctgccacaggccccagccaaaaccatctgtggtcacatgcacatccaactcaaatgagcacccttggtcaactacccatagggcttgtgcctgctgaatagcctatttagctgccaggaagtcagtctcagccacactatcttaattctaggcaagaggagcattgccgcttctaaatctgcaagagaatcagaggttaacataatattatcaataagaccatgacatatgatggggctatgcatatatccctgcagcaacactatgaaagtccactgtcaccttcccgtgaaggcgaactgttcctggctctctagagcaatgttaattgaaaatgcattaatcaagtccaccacatagtggcactgtccaaattccatcatcaagcggtccatcaaatctgtaatagatgggatggctgtcaggccatgtaaaacatccacccccagaatatatcagcgctggtgtttaccagtgccagcacttgctgtatgttggtggaggaccagtggattgctaatttcacatgtggcctctatttgtctggtgtccccccaggccaggcacctcagccagttccctaatcaaacagaaaaagctcaacatttccacctggctgcagcaagtagtctttgagttgaagcacctgagtgggaccaggtcatacagcaatgtcctccttccccttctgcatttcctggaattgctgctcttgagacagttatctccacaaagttaaragtacttcattgggctgcttatcgattttctctcagtcaaccctggccaaagtcaaatctatccacatctgtgagtgggtcacttgttggggcccccttttcttccatgatggggaggctctgcaggtggggcatcttccccttttttacagtgcagacccagaccaagcaggggtctctggctgagatgacggacccaggcctgcattcacaacagcctctaactccctttccaaccctatgccaggccttcaggcaccccacctgcacctggagatccccattcatggcagcctctaactctttttctaagctgtgtagctgggcctccaggcaccctgcctgtgcccaaaaggccctttcctgcactgcatccctcagggattgggagtgtacttcttgtagcacagaaaaaatgcccatccaactctgctgtcaaaggctcattccttctcggtgctctgcacttccagctgcttcagtgctttctccgtgctcgtggggtacccatctactgctggccaggtttccaacagagttcacccttgcagcacagctgtgaccaggtaccacaacccatgtcgtggccacattgccaacccagaatcagcagggaccaaaggctcgcccaccttgggatcctgttcgtgatgccaattgtcaggttctaactgaggtctgaggggagtcagtgggtgagtggtgggtagctggaaaaacactagaggaatcatgcacagtttcaacgtgcctttactgtctgagtgtgagccgtaggtgcaaaccataggtacagtgtcagtccggtagttataccttttacagacaatagtggctctgagccagttacaagctcatgtgggtgatcacctaatgcgccttacgtggtgtagttacataatgtgcagaattgtgcacctgcactccaaacttgctgagtcatgctggacctgatgtctgcctcagcctattgactgcagcgcatacattttccttaaatcagatttttaaaatttttgcctgtcagatgaggtatgtctgtcactattgttttaattattttttcctaattgctagcaaagttgcctatcttctcaaatgttcacttattgttttttttcctgtgagttcttgcatccagtttgaacagtactatttaactttgttttaatgctgtcaaattcctaaaatagttgcttatgtcacagaagttctaacctcagaatgatgatatccatgccaaagcagttgaaatttaaattcttagataagtaactttaaatattccagtgttatagtaaaacatttatactggactattcactcaaaaattctttaaacagttgtcaaccttatttatttcattataataattgtaactttaaatgtgagatatgataaccacatctctgaaatgtgacaaccttgtccaccaatgttattatgcctgaaacataaatcttgggcccctgctcagaacctttgccttctagtttcagtaattatgaaattaattttgtgtttggtgttttgcaaattaaacttaccctattaaccctatagcgtatatacattatagatmtattattataattattatatttttaaaaatagctttatgctcattgggcagaatctgtatcagcacattttttggcagaatagattcagtagactaataactctgttataaatccctggtagcaatgttgggtaaattcagtggactaataaatctgttataaatccctggtaacaatggtggggttttaatgagtaacataaagaacttagaataaaacaacttaaatatatatatatatatatatatatatatgaataatattaacctttattcttatatttgtataatgtagttatctgatttgcagagggagagaaagagacagacaaatggatagacagacagaacgagatcatttagaccataaggttagaaaaatattatgagactatggaaaggtaatgaatatggtagagagagatggagctgaagattataattctttacttatggactgctccaggataactttgtttgatgttattttagccttctgatatcagtttatatactctaaaacgagtagaaaagaagcatcagtttgtataaatattctatttaaatattgtcaaagcaggtccatgcatcagaagtcaaattaaaactcactggggaaaactttgaaaaggcctgaaggaaatgtacttgatttttataatgtaattggcaaaggaaattgtagtcaaatatgagagctaatgaaagagtgaatggataagtaaaatccacaaataagcacaaatgtcattgggctgtttccctttccttaccaaagaaaatttcatgagagttgctaatgaataagatctgaacattatataacctttataagcattttcctcaaccatttttttctggttgagatgtcaacaagaagtaatatatcataatatacaaaagaagatgcatagtgtattaataatatgctaccaattaaaaatcgctggaataatttggcattggaaatgatgaaggcataaagagcagatcttgtattagacaaaaactaggaagttatagttaggttgtagtaaatgatgaacaatccattttgattgtgattcccaactagcttttaggcagagcctcaaccacagaaactcaatcctagtggataaaaaatatgcagacaatttgaagggagtgaagagagcagaagaaagtatgatgaaagaattgaaagattatgcaacagaggagtatttacagcctggctagataaatgaatggatatattattttttttaatttttttagctaatttacattgttaatttttatttaactattatttttaaaagaagataaatactgcagtggaaagagacttaagggattatactaagggcaattatgagaactcttgggacaaaataatggtcttatatcaacaaaaattccctggaagtgtgatatgtcagcttgcagaaaattttcccaatgtagtgataagaattctctgaagacataggcagattgaaaagacatgaataagaaacaatgtgagatacatttccatacttactgcagaggtaaagcagaatggaatttgtatcttttcctctgcaggtcctattagagaagacaatagagaaccctctaagaggtgattgtcaaattggttaatatgctgtggtttggagtgcctgcattgtgaacaagggcacattcattcaactttccacatcttcctttccctgtaaaatgtacatggagttatggtaccttattaggctattgttagtatcacatataaaaccatgtaaaattcctaccttatgcctggttcagtcagtgctcctcaggtggtagctattggttaaccctattctttataacataattgaaattaggttatatgacttttaaatatccaaacagtcagaatagaaatattgatgagaaattttgcttcatctcaaaaacagtgttagaactacaccaatggagtatttttctcctaaaaggttaatcaggatatgacatttataggatttacaatcacaatcctgataactgtgaaatataatatcagactgtttcttactattttatttttaacattgacattaagttaaataatatattttgttactgtagcctaggattttattttccctgttatgagaacaaggataattattttacaaatgaaattttaagggattagagtgccatagacatgctcattgcattattaatgtgcagaatactggagttctgccatcttcatgaatccccacattacattttggataaagaataagttctgtatataaatgtaggcttcagaagcttttgttgattctttcaccatattttatacaaaggctttcttgctttcctgcctctcatgctaagtacaggcccttcctgtactttcggctaaacgagatggcctttcatgtataaaactcagctgaaaaattgacttcttcataaaaccattcctgtttcatccctgactcaaggtcctgacttgaattcttccgacttccctgggcactgagccagcatagttctggttcgttgtwtaattgtttatatccttgtagcatattcagatgcacatagtcaccatgtctcacccagaatcagaatctctcaaggaaagaaagcatgtcctctctttccctaataatccccaaagctctcaataccatgctgtgcccacagaagggaatcagttaaatctgctgcaattgattggaaacttcttttcccccagattttccttaggtggtctcctgcagagttctgtctaaagtaatggagacttgggatttgtattctcattatgctaatggttattacttcctttatttttgaaaactggttgtaggatctaagctaaccatgctattttctgcataccacccagcgattctcatttagcaactgccttcaaatcgtctactccctttggtctcctcctcccctcagtaggagaaggatgagaggaagttggaatatttacactgagatgagatccttgagcacttgagccctgaggctgcctctggactaacgtttctgttcagctgtccccaggtttttcaacaagagctgtcagaaacaagtttgtgactaaagagcagcttcatctgtaacttctgtttcttgctactccctgctgtgtttctggctatctggaagcttctcagcagggtagcaagttgttggcgccactaacacctttcctctttcaaattcatattcttccttgggaggtgagtttgcatttcagaaaattctattttagtgaaaccacccaggaatcagtgtcagttggctttcagctgtgaaataactgcagagactttgttacagctaagggggtgcgattcttttggagagtttagattttctgtttatagagaagagttcttaggaattttatgcttagctgaaagtattaaacacttttccttatttcctcaacatgaattctttttcccggggctgcaggggaaagggctctgatcctggttcagtctctagcttgatcattttagtcgagttcctttacttccatgcaactctgtttcctcaagtataaaactattagttgagtgggtagaagaagtagatgatctttaaagcactttttaagtctaaaatgttatgattctgctatcaaattcacagcttctcaacatcagataagggttggcatgagtgttgctgaaaatatatttgggttggaggaagggatatcctcgattaaaaaaaaaaaaaaagccagatgagaaattaagacttttcagccaatgctattgacataaactcagggtgactttcacgtcctaagtagaagtggaacgttcattaattaaagcttaggtaatacctctttatcaaaattaataatttatgttcaaattaatcatcatgaattgacatagctaatttgacccttcatggttatcagagtctttttggtgaatatcatagtctacattaattgaaagaggataaggtacataggtgtcctctcccacaactaagccatcatgtctaatgtagtaatgaaagcagattttggactgaattttgttgactggcaagcttttgttaccaaggagccacaactatcataaagcctattctcataagctccatagactcccagctttctgtcccttagacattgtgataagcgtcttacatggaagatcattttttattatgtctgtttgattcttctctctttcttccttattagtctagctagtagtctatctattaattttttcaaaaaatcagctcctgtattccttgatttttcaaagggcttttcatgtctatctccttcagttctgttctggatcttgtcttctactagctgtggggtttgtttgagaggacatgaacagacacttctcaaaagaagacattcatgcagccaacaaacatgaaaaaaaagctcaacatcactgatcatttgagaaatgcaaatcaaaaccacaatgagataccatctcacaccagtcagaatggccattattaaatagtcaagaaacaacagatgctggtgaggttgtggagaagtaggaacgcttttacactgctggtgggaatgtaaattagttcaaccattatggaagactgtatggcgattcctcaaagatctagaaccagaaataggatttgacccaacaatcacattactgagtatatactcaaaggaatataaatcattctgttacaaagatacatacacaggtatgttcattacagcactattcacaatagcaaggcatggaatcaacccaaatgcccatcaatgatagactggttgaagaaaatgtggtacatacacaccatgggataccatgcagccataaaaaggaatgagataatgtcctttgcagggacgtggatgaatgttctcacttataaatgggagctgaacaatgagatcacatggacacagggaggggaacaacacacactggggcctgtcagggagtggggtttagtgagggaaagtattaggaaaagtagctaatgcatgctggtcttaatacctaggtgatgggttgataggttcagcaaccactgtggcacacatctacctatgtaacaaacctgtgcatcccgtgcatgtaccccagaaccaaaaacaaaaaaaataaaaacctaaaaaaaatcttatttcaaaaacaggctatgggctagatgtggcctgagggccatagtttgttaaggcctgggactagaccaacatatgcatgtgaccatcttgtggatgagtttccacaagactgagagctccataaaggcagagactgtattttctcattttttattcccctcagtgccaagaaaaacagtaattcaataaatgtttgttgcattaaagaatttattcacgaagagttataaaaatcaatccactgtttttccatttgctatctctgaacatgtactatgtcatttttacttgaagatatttatattgaaatctctggttagtgatgtctcacttctgtgtacagctaagaagacgtacagtttttaaaataatgttactaactgtaacaaaaactattttatcaagaaatataaaagaaattctttaacaaggttgagaggttacttcatgcattaagtttctgctatcttgctgatgttctgctataaaaccttacagacactatgtctgtattactggtttcatttgaaattttgccttatgattaatctaatttggtttcattgtccataataaaaagcaattgagcatcactgatgtgsataccattttctttaggttttaagaaaaccactctaatattttttcagggccattattttatcaaatatgtatatatgtgtgcataaggagarggagctcggaaaaggatttatatttccttatagtcaattttatgttctttctaccctaccactagctccaccatattgaaaatatctctataaatatgggttatgtcctataagcaaaggatacattctagaattcatttctctctaaaccatgaagcatcatccttaagcaagatgctaaacctgaaacctctgtagagcacatttgggtagacttatgttctcattcttgcctagaagagagatatttctagttttcttatttgctaaccttataatttgagcacagaatgtcagatttgtttcagcccttcgatttaatcacatcatgtctgatatcctagcatttaattacccaaattcccagtgttgttcaagaaggtaggtctgtggtgggttagccttaagctagtggctgaaaaggtcttgatttgcccccacatctaacctagtcacttcctgagctgaaactcccatatcacctggggacaagcgaccctgaaatcctcactggccacagcttcttctgagggaagctgcaggaaaaagaacaaaaatgagcttttgtgaaaggattaacttgggtgaagaacatcctccataaccaaataaatggaacctagtaacccacatggccaatccccagggcactagtgtctttggggatatcagggtgtgtatagaatttcgtttttgtcattcttgaaaacataaaawaatctctgaaagagtactagtggtcaaggtactagtctagagatggaccaaacaatcatattaaacctaatttaatctccagaatttatattttgagattggtagcactactatcttcattttgtactttccccaacttcctgcagctaggattcaaatacagaccatctaactccagagcactgccctttaacattgtgctataatccaccactttgcatagttgatcctacaagaggataagtagagatcaaagtaagaagtgatcaatggattactatgtcaagcatgattccctcaaactattgggaagaataaataccataacatgtatagggtgctgtgtacaattcctggcacaaagttaagtacatgataaaatggaactattaatattagtaacccagataggttctgggcacattagcaggaaaggtcttcttaatttaagtaaggtgctaaaagcatctaattttattaggattgttatgaaacaaaaactaaatgtgcaagaaaatatatttaccgtagcctggggaaaattgtcatggtttctcttttcaaagaattcaatttggtaagaaacagccttcaatggtccatgaaaagtgagaagtgtagggaataagaggctctttcctatgtttgcatttcaggcttgccttcttacttttaaatttatctttacaattgccttcctgctgggtttgtgtcttcctcagtttagggaaggtgacaagaaaagtcctgtttgtgtgtaattgacatgaaaaatggtaggcttttaactcaaggaggctccagacaacagtttggttattaaggaaggggaggacctaggggaacaattgtttctggcctctcttcttctcaggcctggaacaatctttcatttactatattcttgccacaagagcacagtcaatattaaattccaaaaaaagaaaaatccctcacagaaacagctgtgttcaatatacagccagtttactctggcgaattgctagacatggaacagttttcatttctttttgtgtttatccctgatagttgtcttgtaaaatctgccttttgtaaataagggaaggctggttttaaacagctttgactaatattggtagttggagtattcagtattacagagttttagagaactaaaataaacctgatggaaacacacacatatttcaaaggaaacattttaaggtgttctggttccattttttccattttgtatgtaagttggattatgatacttttatgtctacattgtctcttagtcaaaaatgtgagagacgccattcaagtctagacttggaccctactgaatgccttgttcatggacaccacacaatctcgatgtaaatgtttattgctgatctgtacaaaaaggggaaaagtagttttttgaacaacagaaaataccagttaatctcactggattcaggaattatagcaaagcaatccaataagtggattctctgagagtaggaactcaagtgtgttatctcagtttttatccagtttccagcacaatgctggcaccatttaaattctcagtcaatgctggagaattgaaaaagaatcctcaaaatttggatgacaaaatgacaaaggtgtcccctgatacagaaatctgtccatggcagaaagattagtgatttgagatatggtgtcatcattgtagatgatggtgtcccattaagcatgttttcactaattacaataaatgttgaaagaaggagtttcacctagtatccttactaatatcagggaatggcctgggctttggggagatgagagtcctctgctttcagtttaataaagtaggatatttgtgtttttgtttatattgttaaatacgacgggttagcttgtcacctacataatattgtgtggcataaataaaggtgaattcccaaatatgtgctccatagtgttgacaatgagtaaatgttcattctaataattgtaagggttacctccctcgcactccttgaaaatatctttttattcaaatttttcgagctggaggtcatgtgttacatttcctgttgtgtaacatggcctccctctctttctctgtctcactttctcactttctccctctttcttttactctctctgcctctacctctgactccttctccttcttcccagctttgcatcagagccatgtaactgacattttcttggttccctcaggacctgtcataatagcaggcaaatattagatgatgattcaatgtttaatgaatttttcttgaatgtatgtatgttgcttcaagtcattcatgcacacattgaagaggacagacagagccctgctgaacaccactagcaaatctctctctagtagaccacaacaagtcaatctgtgctctttgattacagttgttcaaccagttactaatctaactaattgtaactggttgaacaactgaacccaaagggtgcaaagtagaaacatttcattgtgaagtcggctggggacaaagaaaacaccaccagaacccccttcaatatgcaaagggaaaattccttctcaagtacaagctacatggtgcctttttgaattatcatcaatttgtaatgctgtatcaatacatatgtattatctgttcttttggtaagggttgtttgaagtataaggtacttcctccattaaggtgatactaaccacatgttaattattgtctgaaagtcaccaaggatatgaataataaaaagttttaaaaataagacctgtttcttttattgatagttgtacctcaaggctgaagtgaggtttgcaatgtaagttgtaaaatgtgatgtgaaatagacaattctttgtagtttatataaggcaatatatccatgtgcaattatggtcaaaaacagcagacttttaagtgattattctaaagttatttttttccaaaataactttattactcttgatatcataccatattcacaaaacattctggtaaagctattgctcagtgtgttgtcccagtgagactcagggaacatttctatgtgacgctttaggattgaagacagttccacgttttctgagtaattccaaactgtgtaagagattatgttccctttgcatattggctgctaagaagctcactttttcacttatgatacttggatgcattttggctttttgggtttttgttttttggtctaattttttttttttttttttttttttttgagacagggtctcactctgttgcccaggctggagtgcagtggcaccatcatggctcactgcaaccttgacctctcctggctcaggtgatcctcccacctcagcctctcaagtagctggaattacaggcatgtgccacaacacccagctaatttttgtattttttgtagagatgaggtttcgccatgttgcccaggctggtcacaaattcctggactcaagccatcttcctgccttggcctcccaaagtgcgggcattacaggtattagaggtaggagctactgcatctggccatgggaaacattttgaatgataactttgtttgtttgttgtctgttgagcaggctggagtgcagttgcatgatcacggctcactgaactctttcctttaatttttttattctctcagcacgattataatttattttaaaagtagggaataattggccaggcgcagtggctcacacctgtaatcccagcactttgggaggcygaggcaggcagatcacaaggtcaggagatcgagaccatcctggctaatatggtgtgaaaccccgtctctactaaaaaatacaaaaaattagccgggtgtggtggtgggcacctgtagtcccagctgcttgagaggctgaggcaggagaatgacgtgaacctgggagggggagcttgcagtgagcccagattgtgccattgcactccagcctgggcgacagagtgagacttcatctcaaaaaaagaaaagcagggaataattagtaagtgcctaactaatcaaaaattgtttccaggtgatgttgctgttgatgtatgaaaacctctttcacctagcttccctcttcattcttttctgtcatatttctattgaccagtgctttcttggcccttggaaatgtgattaacttttgccatgacctctatgttagtgccacacctgacacctttatgccactctctgcctccagaactctgtgtccatcttatatgtttttaccttctgctgggcctcaggtctggatgcaaagctgtagaggaattgagctgtttttcacaagggatccaagaacacatagcatgtgtgaactgtactaaagctttgagaagttgtgaagaagattcacatcaactatgcaccacacagccttcttgtcttgctggtaccatctcctcacctctgtgttgctcctcttggagtcttcaccttccacaaccagcacttctattctcactgtctgagtgtgactttccataattgtgaaactccttgggcttatccctcacactcattcttgaattctaaggaatggcattttctccattgtgcttacatttgcttttcagtattaattgttctagagaaaagcattcattcactcactcactcattcactcatttaacaaaacctgtatgggtatctacagtactatgttctaggtatactgaagacactaacataaataatacaaataataaccttttctcagggaatttagattaaagtagttcaaattggagcaggggaagcaaatatttacgtagattatcagggaaaatgtgtagtgagtgccgtgattagcactatgcagaagattttatgggagtggcaaaaagcagaacctaaccttttctggggtgaaaagtgtgacctaaactgagtcttaaagaatgaatgtagggtggagagaggaatrggaagagcatttcagggagagaggaatagcaggaacagagacactgatgcaaggaatcccatggtatttgtgatgaagggatgatttagtagttcagtgacaagacatgagcctggagataaataaggtttaggttctggggaccttgtgagccaggttaaggactttgggttcatcctcaaaccatgaagcattccaagcaattatgtgacaagatcagattctaggggctgaatggagaataaatatgtaagtggcaagattgaaggctgggaatgtaaaaggtggctcctgctgtggcttgggcaaaacatcacataggcttgagctagctttgtgattctacgggattgagaggagaatgctaatttcataaatgtttagtggatatgattggcatgtgawctgaatgcaactggagaaggggaccagtcatttactgagtwgatattggtaattgataaataagaccaaagaaggtgaggtttggggataggcagtgtaaattttggaagtaataaggggattgaggttctgtccatggcattggtggggaaatctagcatgtaaatacatgtaaatagataagtaaatatgcctatacatttatataagatatctatacacttattctccttctttgttcatttattaggtgtgaaatctacgtgatttttttctcccatattatttttggtattcaataaatgtgaatcatgaagagatagctgttttatttaatctctgcaaagtcacattcttacccattttgattgtaataaaaggcctatgtcgttatttaattttttaacctttgtggcatgatttatagaaggaaaataaaagtgtcataggtatgataggccaaagttgggttgttggtaaaataataataccacaaaatgtttttctatttagccaactactgcaaagttactttaattgtgtttgcaattaattgatttcactttaaaccagaaacaatagagactgtaatcacacagccctgcagttctgaatgttttgttcttccttttattggttttctagatattcctagttggcaacaggatagagttcagtaatggttatgcaatttcattgtgcagggtattaaaatttgtgaccagggatcccaggagaccagctattagattttcaatgcactattagattaaatmtatctactcaaactaaagggatcctgcctgaggctgtctgatcaatagtctatcattcctgtgcaaatgaagctattaagattctcttaggaggtagactatctaaattggatctaactagtagatggtgactgaaatgagggatatactgatacttaattggcatcaatctgaccttgataagattttgaaaaaataaatacctttttgctacaggttgaaaaagaggtgtaaaatagtccctattttatattattggttcttaagtacttatcagaaaaatgacaaaagtcagtgtccataaacaaaggttccattgatctttgatcaccaaatcatcatttctatcttcctcttttttgtttaggtcactgcagtcaccattacctccaccaccatcataattatatatagctaccacttcttggacactcaggtctgcttgtgtttgaaccagacatttctagctccaaagcctgcattcttaatttcctgcagtcttaataccatctttttaatagaagacccccacaggaaaagctgattctataatttaaaaatgatttggggatccaataagtcatgattctattttatataattttggaagatgtggccagagagctaactctttttattttattatttttcttttaattgttgacgtacttataaccaccagctatgaagctataatttattgccacattgagtatgttaaattgttaatttacataatttctgattcttatttctcccctctcaaattcaatttgataatttaacatacctgcttctgtgtgttccatggaactattaatataattttttaacagaattatgagagaattacatttccccagctgtagatcaattgagaaacagtagaaatgaaaaggttaagaaattctgcttcaaaatctcaaatggtcaaagtcattgacattgtaagctcttctgttcgactcaagcctggtggaaaatgtaatgaagaggtacaaagtacactgcataatccagcaagctaattgcccactttaaggcctcttgagcccaatggccaagtgaaacctccactctcagggaaattaggcaactgctaaggtggttttgcagttttcagagacacagagattaggtttttcagccttatatagatctgtgatcactaatgatagtctgtgctaatgaaggtagttttttgaatcaaatgcatattgacttaggtcttcagcgcagaatgttgattcactgctgtcatccctgtcaagagagctgcatatgtaattatggttttcttytgaatagatttgctttgggactgtcacgcaaattccatttcttcatgttcttgctatctttcaacctcaaataaataaataaatagaaaaaatatctctaagcactatgtgtgggctgtcattctttttacatttagtgttctaatgtttttaaacaagtcagtttacaggtaaagtttgctgtaataggattgaatgtgggtgtatgtggtggtgcttcagatctctttccttctgcttgacccttcatgttgggtaatagttttaaagcgctcatgccagaaagtaaaccacaacatagtcaacttctcaaatatccatgcaatgtagaaagtccggggtcaagatgattactatgtgatctgcttaagtgggaacagggccatttccctcgccttcaacacactcagatacatctcagccaaccaacattttgctgtttgaaaaacatggcagactttatcttgtccctaaagagaatgcttttctccatccctctgcttaatatcctgtggctccatttaacctccaagccaaagtccagtttcttttagaagacttcaggcaaaattaggagcctcttatagtgggatgaatgctttctatactgtttttgtaatatttttgtaacatttgccatattaaactccatttattttatgggtctgaatcttcactagactaaactgcttgagagaggagcatgtataattcattttcatgttcacaatgctgaaactgatgtctatagagcttcagtatttgtccactgcataaaatcagtaaataaaggcaggaaagtttgttacatcaagtaggaccaagggctagatccattgggacaattcaacagggcttttcattggttattctagctgatatcaacctgccctgacctgaatcaactctgagcccctacctaggctgttgtttcttagcaagtacataataacaactcatcagaatagcagagatcttggtaacaggttgcctgacacttgactgatatgggaaaatcctgaacaggtttggactggaatcttggctcacaacctgtgtgaccttggtcaagatattttatctctctgagcctcaattttctcttctgttaaatgagcatagtgaaactttgttcattggtttgctttgaagagtaaatgagatggtaagtgttggtgtatgtagtgcaggaacataacaattcttgatagatattcattgaatacctrtagtacatagaacatagaaagttcctgttattccactcccacccccacacacttgcccttcaggtctcaggttctccttcctggtacccccagaaagattaagcccctttggccctctatgtgcctcttttatagcatttaacacaattataattaattgattatgtaacttttttatttaatagctgtctcttgtagaatataagcacataaattcagggactatctattaatgaattttcctctagtgcctagtacttaggtggctcacagtaaatgctgattcaatggatgaataactttattcagtctgctcagtgtggcctttaatttagattcaccccaaattactccccatcaggaaggctttcttattcaactttctcatcctcaagattagcaaaactactctctttctattcccaaatatcttctctcagtttcattaccatgatcagaaagtactcttccttgaatttattttctagactagatctattttggggttttcttaccagtgattgtaactattgatgtggtcttttttctgttttttacttctcatatgtgtatctctttccattagtccttcattccttcaacagatactttctgttgtgacagccactcttctaagcactatggaaggatttaaagctgtgtgaagcacagttattccggtcaaggaacttaaaaaaataatacaagtgacaaaacatgtgcaagtttgactaaagtatgagactggaataaataccttataaaaaccaagagcttcagtattttcctgcagttttttgctctattgtattctcaacttttactggtttctcatcaaataaatgtgttaaagtataactcagatcattgcttagatgtacttacttttccaacaaggccttccctgaacatcctatttaccattgcaaatgcattcctctccactagcgccattcttaccctctctttccacatcaatgaatttcatagcacttgtcactttttttcatgctgtataatgtatattaagatattgcttattgtctgtctcccttcaatagaatgtaagctccatgtgggccaggatgtgtagtcattgatgtatccctagaataagtgcccaattatagtagtcatttgatggacatttattaaatgaaattatgaatgaagtagggattggcagttatacactaagactctggaaaaatggcctgagttgaatcctggctttaccattcttggctatataatctcatattatttactttcagcctttcatttcccagatgcccctaccttctagggttgttgggaggatggaatgcataatacatgtaaaccagcaagttcatagtaacaaaagttgactttttaaaaagttaacttactcttctttcctatatatgtgtaaatcatattttattttctcattttaaaaagaagacaataactaaaggtattagcacataatgattcaaaacataatatttccacatgtcgagttgaatgactttgagccagataatatgagttgaaatcagtttaacaataattaaatcagccaagagcagtgtctcatgcctgtaatctcagcactttgggaggctgaggcaggtggatcacttgagctcaggagtttgagaccagcctgagcaacgtggtgaaaccccatctctacaaaaaatacaacaacaaaaaattagccaggtgtggtggctcatgtctgtagtcccagctacttggggggctgaggcaggaggatcacttgagcccaggaggtcaaggctgcagcgaactgtgtttgtaccactgcacttcagcctggacgacacagaccatgtctcaaaaagaaaaaaaatagaataaaatcaaatacacaccatttttgaatatgtcaccagtctgtgtagttcatcttgaaaggacttcaaggtccaatatgcatcatgcagagagttgctagggcccagacaagagtgacttgaccattggcctgagtagttaaactatcagataactagtgaaacaattcggctatttcaacaaacatgttgcatacataacgtgttatgcacagagatgacatttggtataatattatggcaataaaaggtgcagttcctgccttggggaagcaattgtaatatactgtgaggagctaagagtaaagaaggggcccttgtaaatgaggggtgggtcagtagggtagcagttggcagaagactcacactggaataaatgctccttgactcgatattttttttttttcaaaaatgcagaagcattattgaagcccggatgtttgggttctatgataaataaaagatatggatttgagctgctcattaaattttgaaagaaaagatcctaaaaggttagagaccatggagatttcaaagtggctgaccttgattagatataagtgtaagtcagatgggtattcctggggggtcccgactttaatacaatttgaaagtttcatgattatgagcacctctctgtgcctccttggtggagagctgacctatgagtagttactgtgtgaattaatgaacatccttcagcaaaagttattaatagtaatgtttggtaaaagtcctttagaagtagactgttatgtgtgttactagttataatcaattaataacctgtgatttgtaggagcaaatggtcatagggatacagtatacattttaatcttgctcttcaaacatcaccgtagatccatggtccttctcaagacattggctttgttctgaagcagctcccacgctcttccagaaatctctatgcgggactctgaatgtggtcaagaagaagatgtactggatgcacattccctatcaggagtctcttaatagtctcccacccagttacaacatattgctgtaatcccacacaacagctgaaacatcttttcttcatttcttttaattcctgtagcatttgatgtctccaccgtgtaatttacatttaattgtaagttgttttgcatcatttaatagttgtttcaagtatgaatgtcttgccttcccaagaagattaaaataagattcctttaagaacagaggctcactgcgcagtgccagacatagacatagagtaaaccacaactactgacttcacttcaagctgacctaaccatcttcccagcgaagacggccaacctggtgtataactcattcttctgatctgcacttactttatagaggaataaatacactgagttattgggagtttgtgaaggaagtgactagaatttcaataaaataataaagttttgttttgtttcatttcgtttgaaaagaaactgctgcatggccaagatatttgaaaatggaggctgggattggacaggggtgaagaattgtgtcacagactttgtactggaaaaatgtctgccttaatctagtgaataaatatgactgttctttgaagtcctttttttcctccccgagtataaattcaaatgctattcattttctgagttgcctgtatttctttagcccttaaggcatcaacctttgatgtcttattttcataatattttctctcttagaactgatccacatattcagtagaatggaggtataaatcctaatccatagactactccgagcttattgaaagtgaatcttatttagattctttcctttatctgctcactgacagatctaatgttaaacagaaccttattatcatcacaaggaagtagattaaaaaatacttttcagtcattcgtattcaacaagtacactccatcaaatcttgcctaactttttttgcaaataactttgctccttggatcctctcccaggtctttatcaaaatggaaccacatacatttgtaactacctcataattaaagttttgagtcattaagttcarttatctttaagggtaaacattgaatttgctgtaaaagttccatttgtttcactaaaattygcaaatagttgtgattttctttgcagatctgtccagtttgatcttgaaacaaaactgcttaaaactttatcagccttccttctttttggcttagctttaataaccacttttaatatataactcagatctataaataatactgagaaaagcagtggaaaacattgcaggtataaagacttttcatgttgactatttttggtaaagattctggacatttgagtgaagtctctcatgttttattggtttattttactctggcaccgcttatgaaaaaggggacttgaattactagagggtaattttctttctttattttatttatatattttttactatttttttccttcagttatgttgtttattcaaaacttgaaaacatatacaatttcagggtcttctagagtatatttacatcattctgatgaacaactttataatttttaaattagcaaatattctcaaccctgtcagctttaatattataattaatgtgcacaaakctgaaaacttttcttgctcatactataatacattaaatagaccttagcaaacaacttcttatttgaatacttgtctgtccctgtcactcttctcatactttagcctcataactttggttataattatgtaaatggttaatattcatgttctcattgcaaaatgaaaagtgaggaagagaaattaagccatttgcctaaggtcacaagtctggtaaaatcaacagaggcactcagaatacctccaaaatcatttccatgatgccagaacctttaaatgctacagaaacaagctaaagcgatgcatttaaatgtgcttctatgtagggcttgagctgtatctaaacttaaattagagctcagccaacatagaatctagttcagcaatactctacaacatgagataaccatactgatgtttgatataaaatgagattgcagaggaaacacattttaatacctgaggtgtgtgcttaatcttcttgatgtatattaaaagctcagtacgtgagagtaatatgaggtgatggggtttactcttaaagagattactaataatgtttatttggaaaaagatgaagattttagaggctatttaagaaactggttctgggaaaaccagccataacttaagagttcttctttcacccaatccccttggaattctgctttgctatagaaccatggtcaaaccaaggcaagcagcacaaattacatgaacaaagaatacaacaataaaaagcggatccttaagaccctcccaagaagaccaagagctctctctttaaaactctgtaaaatacctaggttctcaagtcttcctatgtcttatttcttaactaattgcactatcaattcaaaaatggaacaaaggatattctacgtatcagaaccttttttcctatacattaagaagaacttttcccacatgaataggtaatatcacagtctaaagccagaggatgaaacctatgaattcttcctatcatatattttaacaagaaacgtaaatatctatgacctacttatagccaatttatattttgcccaggttgttttgtttctaaacttacccctcatatggcttaataatgaaggccataaatgtgcctctttcctatctcacccctatgacttgacatgtattataaaatgaacttcctatataaaataatatttattgaatgaaaggaaagtattacatacaactttcattattatattattaagcttattttttgcacatcatrgctagatcatcttaaaatagtttggctctgtctcttttcccattttttttttttattatactttaagttctagggtacgtgagcacaacgtgaaggttcgttacatatgtatacatgtgccatgttggtgtgctgcacccgttaacttgtcatttacattacgtatatctactaatgctatccctcccccctccccccactccatgacagaccccggtgtgtggtgttccccaccctgtgtccaagtgttctcattgttcaattcccacctatgattgagaacatgcagtgtttggttttctgtccttgcaatagtttgctcagaatgatggtttccagcttcatccatgtccctacaaaggacatgaactcatcattttttatggctgcatagtattccatggtgtatatgtgccacattttcttaatccagtctatcattgatggacatttgggttggttccaagtctttgctattgtgaatagtgctgcaataaacatacatgtgcatgtgtcttatagcagcatgatttataatcctttgggtatatacccagtaatgggatggctgggtcaaatagtatttctagttcaagatccttgaggaatcrccacactgtcttccacaatggttgaactagtttacagtcccaccaacagtgtaaaactgttcctatttctccacatcctctctagcacctgttgtttccttactttttaatgattgccattttaactggtgtgagatgatatctcattgtggttttgatttgcatttctctgatggccaagtgatgatgagcattttttcatgtgtctgttggctgcataaatgtcttcttttgagaagtgtctgttcatatcctttgcccactttttgatgtggttgtttgattttttcttgtaaatttgtttaagttatttgtagattctgtgtattagctctttctcagatgggtagattataaaaattttctcccattctgtaggttgcctgttcactccaatggtagtttcttctgctgtgcagaagctctttagtttaattagatctcatttgtcaattttggcttttgttgccattgcttttggtgttttagtcatgaagtccttgcctgtgcctatgtcctgaatggtattgcctaggttttcttgtagggtttttatggttttaggtctaacatttaagtttttaatccatcttgaattaatttttgtataaggtgtacggaagagatccagtttcagctttctacatgtggctagccagtatttccagcacaatttattaaatagggaatcctttccccatttcttrttgttgtcaggtttgtcaaagatcagatggttgaagatgtgtagtattatttctgagggctctattctgttccattagtctatatctctgttttggtaccagtaccatgctgttttggttactgtagccttgtagtatagtttgaagtcaggcagcgtgatgcctccagctttgttcttttggcttaggattgtcttggcaatgcgggctcttttttggttccacataaactttaaagtagtttttttccaattctgtgaagaaagtcattggtagcttgatggggatggcactgaatctataaattaccttgggcagtgtggccattttcatgatattgattcttcctatctatgagcatggaatgttcttccatttgtttgtgtcctcttttatttcrttgagcagtggtttgtaattctccttgaagaggtccttcacatcccttgtaagttggattcctaggtgttttattctctttgaagcaattgtgaattggagttcacttckgatttggctgtttgtctgttattggtgtataggaatgcttgtgatttttgcacattgattttgtatcctgagactttgctgaagttgcttatcagattaaggagattttgggctgagacgatggggttttctaaatatacaatcatgtcatctgcaaacagggagaatttgacttcctcttttcctaattgaataccctttatttctttctcctgcctgattgccctggccagaacttccaatactatgttgaataggagtggtgagaaagggcatccctgtcttgtgccaggtttcaaagggaatgcttctagcttttgcccattcagtatgatattggctgtgggtttgtcataaatagctcttattattttgagatacatcccatcaatrcctagtttattgagagtttttagcatgaagggttgttgaattttgtcaaasgccttttctgcatctattgagagaatcatgtggcttttgtctttggttctgtttatatgctggattacatttattgatttgcatatgttgaaccagccttgcatcccagggatgaagcccacttgatcatggtggataagctttttgatgtgctgctggcttcggtttgccagtattttattaaggatatttgcatcaatgttcatcagggatattggtctaaaattctctttttttgttgtgtctctgccaggctttggtatcaggataatgctggccttataaaatgagttagggaggattccctctttttctatcgattggaatagtttcagaaggaatgttaccagctcctttttgtatctctggtagaattcggctgtgaatccctctggtcctggactttttttggttggtaggctattaattattgcctcaatttcagagcctgttattggtctattgagggattcaacttcttcctggtttagtcttgggagggtgtatgtgtccaggaattcatccatttcttctagattttctagtttatttgcatagaggtgtttatagtattctctgatagtagtttgtatttctgtgggatcagtggtgatatcacctttatcattttttattgcgtctatttgattcttctccctttcttctttattagtcttgctagtggtccgtcaattttgttgatcttttcaaaataccagctcctggattcattgattttttgaagggtttttttgtgtctctatctccttcagttctgctctgatcttagttwtttcttgccttctgttagcttttgaatgcgtttgctcttgcttctctagttcttttaattgtgctgttagggtgtcaattttagatctttcctgctttctcttgtgggaatttagtgctataaatttccctctacacactgctttaaatatgtcccagagattctggtatgttgtgtctttgttctcattggtttcaaagaacatctttatttctgccttcatttcgttatgtacccagtagtcattcaggagcaggttgttcagtttccatgtagttgagcggttttgagtgagtttcttaatcctgaattctagtttgattgcactgtggtctgagagacagactgttgtaatttctgttctttaacatttgctgaggagtgctttacttccaactatatggtcaattttggaataagtgcaatgtgatgttgagaagaatgtatattctgttgatttgtggtggagagttctgtagatgtctattaggtccacttggtgcagagctgagttcaattcctggataaccttgttaactttctgtctcgttgatctatccgatgttgacagtggggtgttacagtctctctttattattgtgtgggagtctaagtctctttgtaagtctctaagggcttgctttatgaatctgggtgctcctgtattgggtgcatatatatttagratagttagctcttcttgttgaattgatccctttaccattacgtaatggccttctttgtctcttttgatctttgttggtttaaagtctgttttatcagagactaggattgcaaccccaccttttttttgttttccatgtgcttggtagatcttccttcctccctttattttgagcctgtgtgtgtctctgcacgtgagatgggtctcctgaatacagcacagtggtgggtcttgactctttatccaatttgccagttagcatcttttaattggagcatttagcccatttacatttaaggttaatattgttatgtgtgaatttgatcctgtcattatgatgttagctggttattttgctcattagttgatgcagtctcttcctagcatcgatggtctttacaatttggcatgtttttgcagtggttggtactggttgttcctttccatgtttagcacttccttcaggagctcttctaggcctggtggtgacaaaatctctcagcatttgcttgtctgtaaaggattttatttctccttcacttatgaaacttagtttggctggatatgaaattctgggttgaaaattctttaagaatgttgaatattggcccccactctcttctggtttgtagagtttctgccgagggatcagctgttagtctgatgggcttccctttgtgggtaaccygacctttctctctggctgcccttaacattttttccttcatttcaactttagtgaatctgaaaattatgtgtcttggagttgctcttctcgaggagtatctttgtggcattctactagagggtaattttcttttagggtgttataattattttaaaaattgattcattggaatatgttatcaatgtcaaaacatgagataacttgatgattatctctttatgaatttgaggtgctgagtatttcttgtttttcaattacagcattctttcaaatagccagtctcatgtttctatttctctcttagctgcttctttctttaatattttgttgctaatgagaacctctaccaaaatgagtaaccaaagggctgaagaaagttgaactgttaaatggtgtttgttaattgcttcttcaattacagaaggattttatatgttgagtaacatgccatttgaagatttgacaattccatcctctccttggtaactccccagtcatttggtctagattgatccatcatctttctcacttaagagcatttagttctcaccttcaaataatcagcagattaaaatagtggtacatagtcatctgtaggaagaaagaaataagctgtacagtagagtgctctgtgggtaaatatttgttgtgttgagatataacctgtgtatatttattaaatatcagtgacatttctttgcttattctttcattcactcaacagatattattgaacagctgctgtgtactaggcattgttcattttcccaaattctaaaattgtgatcatttctatttttaaaatgtattatttaacaaagtactggtaatgatatatatctttatttcccagtgggttttggcaatatagcataaagatcatgaaagtgggctctagaatctgagagcctgtgaaaacttcagctccaacactttctagttgtgtgagcgactttaggcaagttaatgaacttccctaagctcatttacttcatctttacaataggtataataatagtacttacctcatgtccactatctaaagagtaaatgggaaaatatgcaaagcatattgcactgggcttggcaggcaagtaatccctcaatagatgttaaatttgctgctgttattaaatcatagttcttgcttagttgattgttataatctttttcagtatttattgaacaaatacctatgaagtgtactcagagtaaacttggacagtgagagacaccaccatctggcctgttgtgtcataaacaaaagccttaaaactgggtcttggcaatggtgaggggaacagatgctctaactgccttctagaatgtgtttttcactatgtgtctaagctgcgatgaatgtcactaatgtcatctctctttctattttaggtaagtacatcaccatttttgaaactctgtgcagatgggtaagtcttgctgctggaacttttcctgttgatttgcatacttggaggatctggatcagacagtgtgcttatcgtggtcagaaaatgcctttattttattcaagcagagatctggaaaggtaacagaatttcccacacatgctttccatctctgtttcaaatctttggcagaaaaaaaaaatctgttatttttaattagataaaatgctatgttaaataattgaagatttaatttcttactctgtcaatagaaggcagagtagtttaaaagacttgagaaaagaaaaacaattgtttrcttcctattagaaatcacaaaatcctctctgaagtaaacatacaaatctttgtttttctgctttcaaacagggaaaattttttcagtgcctaacaaacaggtgtttcatgattagattattaatgagaaataattttgtatcaaatagaaaaagtgacaaatggccctgcaagaccwtgtgtgcataatattgtagaaggaattcctgttatgactaagagttgatgtagttaatttagtatgtctaaagttggctgtaatctatcaccacagaagagctggaagaaatgatcttaaatcacaaaggatttagtaaagacctacgtgagctgtgaaagatgattaaactatgaaatagttctcaaaaggaagttataaattccttgccacttgtgaaatctaaaaactacatagacagttatgttcrtattagaaaataaagatttatcctgccttggcacaatgtattgaattggcatgttgttctcagtaacaaagtcccaatttgcttcatcagctttaattccctatttactccatacatactctatactctatgtgttagtctgagtcttgcaagaagcccatgccaaaatgggattagaaatgcaagaattttaggaaatgcccttgtagaggaatataaggagggagccagttaaggctgagggaaacgtcaaagcatgatccaagtttgactctgagtaaagaagggagagagaattggtgagagcatccttgattgggctagccaaaggcatatgggagtcctcaagccaaaatcagccatcagaggaatcctgtttcccaggaatgtgtctgccacaacatgccctctgtgctcagtaaataccaggaagcagggcatgggaggtatggccttagctaaaatgttgcagtgaatttcagaggcatcagttggggccctttgctggttatagttcctatagttggaggtctgcagcatatcctcacggccccacacagagactgttagatcttggttctttctgtttcttattttctattacaatgccttctatctccacatcttactcattcttcatgcccaaatcagttaccacttccttcatgaaggttactctgtacaacctagtggctaataattaccattctcttttgtaattcaaaaattcttgtatttttctgtgatatttattgttttttgttatccatttattcaaaaaaatggtatcgagagctgcatttgtgctagccacttttctatgctctgtgggggagaggatcagaaaaaaatgataaaacatgacagtctaatggaaaagataatactgtagaatacattaaaatatgacagaaatgtttgaagtatgagcaaaagatatgaggagacagaagaaggaagaataaccttttgggaaagaagggagggcagtgctcagggagggatggaggatttaaagcaggacttgacattgagttttgtcttggagggtgactagctcgttaggagttgacagttgaataggcatcattttcaagttcatggttatatgaaggagcatagaaaaggtttgtagtacagagagccttgcatgtcatagggaatttatgggattacggtcaaagagaaatctgcaaaattggcctaaagccagattatatggggcatcgggtcttggcaagtagtttggactttattctatgagcccaatccaattcagaacatctcagagtcatgtgggccaggctgaatgacaaaaatattgatgtatataattctgttatggcatactaaaatggtatgattctaccaaacaaaaaagatggtgatactatatatttaaatatgttgtctatatctaaaaactactaataaattacaatgaagaaatcacattttgataaaagaagataaaaatatagggcataaggccaaaatgtaatggaacgatttagcagactcttaatctcaggtgtgagatttgtcacgaatagctattttctgctcgatatatatttactttctgtacagtgtggttataaagacataactgaaaaatctagttgtcctcgaaatatgtaaggtatcaaaaagcaggattttatgctgagtgtgctttataatatttggaaaatagttataactagttgaagcattcaccagaatgtcacttgacaattctaactttaaatatctataagccataaagttaatatattatattgattttgatttttaatttgatgtaatttcagatttactgtaaagtggcaagaatagcacaaggaattcccagatacccctcaccaatatcccccaaatgttaacattttactacatttactttattcaatctctgtctctcatatctacctttctgtctatctaatcatctatgtatccgtctacccatacacacgtttccttattgatacacattaagagcaagttgcagacatgatactcctttgcttctaaatacttaaataattcctaaaaacatggaattatcatacataggtacagttcagtggttaaaattagcaaattaacatggataaaatgttgttatctaatctacagactttattctaaatttcaataattgtcccaataatgttctgtgtagccaatgaaattacaaaatcatgcttttcaatcagttgtcatgtctctttaatatcctttaaactggagcagtttctgagtcttcgtgaaagactatttcatgacatttatatttttggagaattacatgccaattgttttgtacactctcttgatttatttgggctgctataacaaactaccatagtcttcatggtttataaacaacagaaatttatttctcatggttctggaggctgagaaatcccatgatctgtgctaagcagattttctgtctggtgaggatcagctttctagctcataaatagctgtctccttgctgtgtttttacatggcagaaaggaagagagagttctctggggtctcttttataagggcattaatcccattcatgagggctctgtccccataatctcatcacttccaaaaggccacacctgtaaataccatcatattgctgattaagtttcaacatatgaatttggaggcaacgtaaacattcagtctaaagcatagactatctttcaatttgagtttattttgtgtttcctggggatgatagtcaggtcatacaacttgggcaggaatatcacagtagggatgctaagtccttatatccagaggtagatgctgttgtttagtaccattactgacaattttagctttgatcatttagttcaagtggtgcctaccagatttctccactgtaaagttactattttcctcctttgtaattaaaaagcattttgtaccatgataatatgagagcatgtaaatatgctgttattcctcaatttcttacccaatagctttggaatccgttggtgattcctgtctaaatcagttacttgtgttattatgatggttgctgttttcattggtttaatgctgccgtaacagataccacaaactgggtaatttataatgaatagaatttatttggctcatggttctggaggctgagaagttcaggatcaaggggctgcatctggtgcagtcctttttcctgctgcatcatgacatgatgaaaggtatcacatgggcaagaaatagggagaagggggccaaactcatttttttttttttttttttttgagacagagtctcgctctgtcacccaggctggagtgcagtgactccgcctcggctcactgcaacctccacctcccgggttcgccattctcctgcctcagtttcccgagtagctgggactacaggcacccaccaccacgcccggctaattttttgtattttgtttagtagagacggggtttcaccgtgttagccaggacggtctccatctgctgacctcgtgagccacccaccttagcctcccaaagtgctgggattacaggccttagccaccgcacctggcccaaactcattcttttataaggaacctactcctatgataacagataaagtaatccattcatgaagggaatgctctcatgatctaatcatctcttaaatgtcccaactcttaacactgttgcgttttggtctaagcttccaagatgtgaactttgggagacatattcaaaccatagtggtttgctaaggggaaatcttgtaatttcatcatttcttcctcttttattagttggctttctattatgcataaaaatgtttcttcgtgcttgtttctgtgtggagtcatgaattctttatttagcaggttgttatcctttaatattgttggttaatatcattatttatcttaatcctcatactgtcctggatttggacagtacaaggtacttctagttgactcccttgtcattttaacacgttactatcattctttgagtacttttttactttttggttttagatatgagactcttgttcttttatccaagccttggaatcagctacttttatagggctctctgtttcctttcagtaaagaatggtttttagaaatcaaaatttggagagtaggtgtgcttttgcttctaggtccttttagtagacatatctagggggaaagtgtatgtatgtacatactcatatataaatgtgtgcatatatatgcatacccacacatacctatatccatgggtatattcagatatttgtatacattaaacctaggatttcacaatgataatccatcattgcagtgctcattctgttcttctccattttcgtatctgtaactctgtgagaagttacggtgagaagcctggctcccattattcacaatatattatatattgcataggattttcttacctgtggaatgtggtttcaaaaattactttcagaattacccactcacgcctctatggaaaaagagaagtaaggcaaagaaaagtatttcagtaagtagacttttagcattatttatgttttatatgcctaattctgtactcaaaattcacttggttagttcttttctcacagccacttccactcacttcacggttctgttacttattttaaatatggatcagttaatttgttttaatatataaatttgttttcatctagagttgaatcgattaatctggaatgatattttctgtttctatgtttaaaatatcaactaataatttcctttccttaataataagaaatctctagcaccatttaagactcagttaactgaggtgtaggtatccatgttttcctagagtatagagctgtgatctaaatcagaaaatctgaacaagtttgtcttggaccaaacttcaggataatctggaaacaacgggacaaatgttagtgcatgagtattttcaaacatagttctgagtaaattccaaatgcatatgtgggtttgtggctcttcatatctggttatttgtacatgatcacatctttattgtagataataaaagttgggtataaaagcaatgccattaattatgtattttttatgctttttgtttcaaaaaaggaattaagcaatcctaactttaaaaatggataaaatgcctatgtaaagctaagttagaaacacaaatgtaaaagtgtatttcgtacttggagttaagtttaggtcttaaaatattaatagcttcctcaaagatacagcaaatagagaaacctgataatatttatgtcttgagagaaaattatctttctataattaattataagacttttcattagggtctttgtgtaaagtaaagcaataatatgtttaatagtatttttatgtgagttacatacatgtacattattaatcatgaataaatagtgatgttcttatacttagtcttgttataagtcaaaatattaaatcattattccatgaaagtcttcatatagtaatttaaatcattgttaagtctggttacttgatgttgagaaagagcttagtacacatagtagaatgacttgccagccttgccattaggttatctttctcatacattacttaccttaagttggcaggagcttgattacagaagataactgtcatttatctctttgtgtggagtgcatatattgtgggatgtctataggagtattacccaaagggtttgtattacagaattatagttaacaaaatcactaggaaatgtttatggagggaagataaccacagatatatctgattacctatttggaggactagcagtggaatttcttgctgtttctcatgtggccaaaactaataaaataaaataaatttagaagagttttgttgtaccaagataatccatatatttcagttggtatggaaaaacatcttttctttcagccattgttactatgacacttagacactctagtctacaaaattatcctaggtttagcaatattggaattaaattttattgttccttcctgattgcagagttataaaaataaggattgagttattatgagaggccgattgtgtaatacatatcatgagttaaaagtaaacgttgacttttattataattgccttttgccacatgagagaaaataaactaagtgaataagactgtctctaagtcttctctgagattaatttgacaatttactagaaatagaaagattggtaatgctcagtctaggaaaggggtaaagaaacaggcacacatatattacttgagagattgtaaattttgtacagttacaatggtaacactccatgtcaaaatatgcatataacaatgcctcttgtagacatttatcctcaagtaacaagaagtaggcaaagattattttatgtattttgaccgtcaatgagttgataatagtaaaggactagggagggttggtgtttaaaacaggccaggtgcggtggctcacacctgtaatcccagcactttgggaggccaaggcggatcacttgaggtcagaaatttaagaccagcctgaccaacatggtgaaactccatctctactaaaaatacagaaatatccaggcactgtggcaggtgcctataatcccagctactcaggcgcctgaggcaggagaagtgcttgaaccccagaggtagaggttgcagtgagccgaaatggtgccactgcactccagcctgggtgacagagccagactacatctcaaaaacaaacaaaaaactaaaacagactaaattgtggtacttccatattttttttaatgatagagatattagcattgaaatttgtcacaaaactacacataatgtaattctttacacatttttaagtatatgggctaaagtatgaaaccaactctgagtaataggattataaatattctttatctccttgtatttatatttatttataccttaattaaattttgaaataatgttgttacttttacaataagaagttgtgaaaaactattaccatgaaaataatctagcaagaatttgatttaacattgctcatttcttgaaagcaagccaagacatttttttttactctttttgagactgagtttaaggtatttgatcaattgttagaggatgagtttatcattttagtgccttgctgatttgtgcaggcacctcagttttaagtaatcatgggattatttatttgttgatttagcatttgttcagtacttatgtgcttaatagcacttgaacatacaaagagaaatgagatttttggtccccaagaattaaaaatttaatggaggagataatcataaacttacagagaagtatatgataggctgtgtcaaagtgggaacaatgtagactagggaaatacaatgcttctcttggatgggtcacacctaggaggggccaaaggggacaactcactgggtattggaatgatctggatccctggattacttggttggtgctgggctgattcggaaaccctttctattttcaactcttctgctaaacatcattatagtaacatcagtacacatcctgctgttaccaagtgtcagtgtttggtcagtttgagttttacaggcatatagaactgccattttgtcatttctgtctacattgtacaaaaaagtaatttaactgagctttataacttatgatttggagaactccacagctcccgttgttctttctcaaaaaattattttcagtgcaacttagctttctgtgtatctccattgctcatctgccctagatggttcaggttggttgctgtctctattagtgtgacaagagttaataaaatgattaattaaaaagagccttaaacgtctacttagaaaacactagataaatgctaagtagggtgctttttggtggatcaagagagtccagatcactaatatatggatggcgtataaattaaatcactgtgtaagactgcaaaatgtcagagaaacattttaatatgttccccccagcatttgcctttctgtacatatgtcttagaattataatgcctacattttaactatggttttctgtgggtatatatacaaatagatagcaactgattaaaaaaaaagatctcaacttttttttttcaattcacaagattggagtatttggagatagggctgttttttctctttttttccttttaaagccatccacattttcttttctactgctttctcactcaaaaaatgtaagctagaaaaagttgatctcatggaagtaaaaaggagaacagagattactagaggctggaaacagtagggagaaggggaggatagagaaatatttgttaagaatacgaaatgacagctagataggaggaattaagtggtagtgttctatagcactatagtatgactatagttaacaacgatatattatatattttcaaatacttagaggatattgaatagtcccaaagaaatgaaaaatgttggaacatatgctaataccctgatctgatcactatgcattgtatgtattgaaacatccctacgtacaattattatgtatcaatttaaaaaatatctaaaaatatatgtgtacctaagtgtatacaccttatatatcctttgatttccttatgaaacacagcatagtttgagatttaaaatgaataaaatggttctttatgctctgtaaaattagaaaatccttcagcttttagaagctctctgttggtttattagttgatcacaaattaatatgtccctttggtttaatctgtatcataaaacaaaagttgactgttcccaaacatgtgcttggataagagaaagctgttaataaatatctattgactgaatgaaagtataaatgaataaatatttttagcccttagaaatatgtgaaaaatacctagaaaatattagacataccaaggtcaatgctaaatgtaaaatgtatttctaagaaaactctaagtatgcaaccatatggattgattaaaactagttacttaaaacctcttatgactgtatttttcttgtttttgaaaaataaatgcagtttgcactctccttgcttagaacttacgtattctatttcacaaaagtgcatgcttgtgttattaaatgtgtgtgtgtgtgtgtgtgtrtatacatatacatatatcttgatccctaatctcagttagctccaaaggtgttctaaatatataaatgttataggtcacagtgtgatctcttaacactatattttttggttgagtgtggtggctcatgcctgtaatcccagcactttgggcggctgaggyggaaggataattggagcccaggattttgagatcagccagggcaacatagtgagaccctgtctctactgaaaatacaaaaaaattatccaggtgttgtggcacgtgcctgtagtccctgctacttgggaggctgaggtgggaggatctcttgagcctgggaggtcgagactacagtaagccaggattgcgccactgcactccagcctgggtgacagagtgagagaccctttttcaaaaaagcctacgtttttcaccaacacatttcaaaattacttttaaaattattattgtttttaaagataggtatgtgccaaaattagaactttgggtccaagagcatctccacattcacataaagaaacttaagttcagtaacttgctcaggctataaagtagaagagttaggatttgaacccaggtcagagggctccaaagccctttcactttccatcaaaaacatttgatattttgccaaaaatatcatgactgtttgtccattkycatttcatatccttcaaacagctataaagtgtggagaaatgataacttcataactcacgctacagctcgcagacacacttaattagcttagggacaaacagttgtgacattatgagtgggagttgcaaggctgagttgaatgtactgatggggatgttggttaaaaacaaaaagccattctattctacatcgtggcaatctttgtacttcaaaagtagtagtattctgagaygtttactgtgtattatagaaaaattgctgatttgaatcacaattcagcaatactagagaaggagaaatctactttttctaaattttctctacagtgaaataaaatgcttttggaatatttacttgaggaatgggttatctgaatgttctcactgaaactcattacaccgtatagtgaaaatctagttacaggtagttgaagtgtaggtatagatagtatgtgattcataatgacgcatgtatgccatgatttacctcagtcactggacagtaagaatgtgattaaggaagtttcctctgcaacatttcaagataagttagctgttttgagccacacaaatattaaactatgcattgtggccaagtgcctataatgccaaaagcacctgtttcaaattgtgagtaatatcttatgtgttacactaytgaaatctccttgttacagaatattaatactacctattgaaaagagtaagaaataagagtttctcatttccacccttttggatttatttcatcaaatgatgtgttgatgaataatgccctttctgtaagatggataactcatggaaagaaagccatttggacatggatactcaagattttaaagaatttaggaggtggcagtgtgaatatcaaataaggtgccacttgtagagagagtatctcagaaaaggagcagagaatcatacaatagaaaagtgaaaagctgtttcctgtggtagatagactctaaataatgattttagagacagacataataaattaatttattggttcattgaagaaacatcctgagttcctatgacatgctaggcattgtgctggtgggggcgagggttgggtgagtagtggcgtatggagatgaaaagatgcatcagacatggtccttgtcttcatagaactttccacagggtaaaactggaaaaaccctgctgggacagagtgggcatctattccggcttaggcaagcatatcttatcctattgatatctgtacaatattatccttaaactagaaatacaataatatgttttattctgacaatgaggaataattttccatattaaggaataggttaatctctaaatagtatgctatttattttatcttactttttcctctgtgtttttaaatatttaacaatttaggtagcatcctagcagggcatcactagagaaataaaatgaagcatttttaagtaaatatattttacagatcatttggaattgtttcaaaaacttcattaacttttaatgaaccaaaaatatagttcattggaattaaatgttccatgtgaagatatttatttcggaaactacatgactaaaccaatggtaagttgaagttaaaaaagtgaccccaagagagggacaatgtcatattattattgttataacccatatatgtttaataatgaccatgcaggatggtgcatatagmaaataactaggtaaagtttctaggaatttttattctatttctcttctttcaattctaatgtatgggccaactcatcattttaatacagagctttgagagaaaatgcataaatgtaattttctgtatgatcactagatggcgccatgcttcccttagaatgaagctgctcaggaatttgcaagtgcagttctgagtatttcacatagaaacctggaagatgagacaattgtatttcccataaggttttgattcactaatatcatcaaaacaacaattagcacgtgttactttgcattcaaaaagggagtaacgattgggtttgtaaacagtatattgaaataatcattactgaggacaaaagtgaagcatgcctctaagaggtaattcggaaggtctcttttgctttccaaaaacatactagtaacaaggaaacatcttatacttgcttggaaaactgggtcctagtcaatgagctatgtcttaaggaatggaaatactggcaaatgtggtaaagtttacatagccattttctgcaaaccaagaagataaattgcattctgcctagtcttaggcaaacagttgggccatttactgttccatcaaaaaaaggattgtcagatccccaaaagcacaaggatgcatatagagtgtccatttaaacttcctgatcaaagatatacactcgtgaaggtggagtggaagacttctttataggagtatgattcatgtttataaaattggagacacttagaaagttgagttaaaagtgactcaaaggatatcttttcattgccctttttatagatggaaaaacatggatgtagctgtttcatacagctaagacactagtgcatcaaaacacaatacatttgtgagacatcttgttatgatttcaaagcagtttgtcaataaatgtgtatgttcaatggttacagtttgggatggtaagacatcatcagctcagaatagtaacatccttccctttatcttttttatagaactttaaacctggatgcaattttaagatcatatgcatcattttttctatatggtgattacattctagataaattaatttgtgatacactctggactttttrtattacatcaagttgaagtttccttttgtggacttagaaacaaaaaatttgcagtaataaaaatgaaaagagattatgcaaaaataattactaatgaccatgtttcttaggtgatgaatttaattgagtgttggtattttaagaatacgtgcatcaagcaaattataatgtaaccaaatatccagagatttgaggaggaatatcaggttattatcacatttcagagctgaatttttcttctttggttcattgactgcattgaatctttgttttgtgggtgatataaactttttcatttcattccttgctctaggagtgactctggggaatcattaggtacatgcttgttggttttccataataattatctctgagccctaatggtttctggatttggcctctcttcactttctccaactttaggcaggagttcagaatggccttcagttgcaaagagaagtataaatccaacttaccatctagtctctttctgtgtggtcttggcaaattttttaatcctggctaggcatgctgttactggcagaaatgaggttctgcctcaactttagctccagccctgccgttagcctgaagactttccaagatttagggagggtccatgaatatctcatcttcaagagtgtgctatagagttatcgagcaactcagatcttttaaaaatcttgagtttaggaatcatacatttaaatgtcagttctcctagaaaatgaagattttaatcctttagaaaaaaatctagggacaaggaattctagcatttcctaaagattccatcataagtagtgcttttaatgtaaagggtttctttgaaaaaaattatttctttactttttttttttttttccttgagacagggtctccctttgtcacccaggctggagtggagtggtatgatcatggctcctgcagcctctacttgctgggctccagtgatcctcccacctcagcctctcaaatagctgggactacgggctcacaccaccacacctgtctcatttttgtattttttgtagagaaggggtttggacatgttacccaggctggtcttgaattcttgggctcaagtagtccttctgcctccatctcccgaagtgttgggattacaggtgtgagtcgtcatgcctggctgtaaaattgtattatatttctaatatgaagaaatacttggtttctctttactgtttagaaagataattatcatgattgttttctttattaactcctatatgatactttgtatttttatcccctgctactcaccccaagcttatttttataattagaaaggaatcaagctagccaaacaggagttatccttccttaaggtagagaagttactrttttttttcaaatggcgatctgcctgcctgagttgctatttggatctctgatgatttcttcctttgatcccctaactcaaagcaggcaatcaaggctatgctgttagttgtaaccagatggaaacctgatctccatttatactttgcctcttgtattgataacaggacatgaaccaggatagatacactaacagtatttgactctgctgcagttgccaggctaaataaccagaactcatatctcattctactctacctatggaaacactctgtataatgaaaatgtgtgttgaaagtgtgtgggtatatgttgtgtgtatatgcattaaaattctcattagcatgggctggttgtaatagtgcatacctgttatcccaactacttgggatgctgaggcaggaggatcatttgaacccagagttcaaggccagcctgggtaacacagcaagaccgccatctatttaaaaaaaaaaagtaaaaactctcatgagaataataattaaagtagctatgttgatcattgcagtaattaaaccaaaatattaatactcatacctgatatagttttttccactttattataattacatttctctcaaaaaatttaagaattagtatatgtttaacatatacaggttgaatatctcttattgtaaatgcctgggaccagaagtrtttcaacctttgaattttttttttggattttggaatacatgcatacacatagtgagatatcttggggataagaccttcatctaaacacaaaatttatttatgtttcgtatatrccttataaacataggctgaaaataattgtatacaatattttaaaatgctttcgtacgtgaaacaaagttttggctgtgttttgactatgacttgtcacatgaggtcaggtgtggaattttccacctgtgacatcatgtcagcactcaaaaagttttggattgtggaacattttgcattttggattttcagattaatgatgcttaacctaccttgtgaaataatggagtcctttattaataacaaaacaataatagatgatacttacagagtacttgtgtgtcaggctctactctaaacattttatatgtattaaaccaattaatcttcacaaaaactctgaattagatatattattattatttccatattttagaggagaaaactgagaaacaagtaatctagtctgtactctaccataatgctatgttacattctatcaacactcccactgcctcttctgaattcattgatagtggtgtggtggcatagagtccacagagtggagcattaattaattttgcataatgtgaaagtaaaacttaagaaaattttaaggaatagacagtgtgcagtgttatggaatcataactatacaattaaggggttaaatgaaatcatgcccaaaatgctgtgttttaaatggtggcactgactgataaaatgtagatttgagttatttattgtttctacattctcaagtgaaaaaggaagaaagtaggaataaaattctggactattggggggggtgtctttagtcttgcaaaaagtaaaaaatagaaatagaagaaagtttttatggttcatattgtaacatcaaaatatggaatgaaaactgtggtctcccatgaagtatttcaggtgctggaaggaaatctcctagactaggactctcagcaagtccatggttcctattatgtccagcatgccatagaaaaactccagaattagttaaatwttaataatttaatggagaaaactaatttttcaaggggcagctagttaacttcagcatgagtcaaaaagcacttcatctgtcaatatttatgtaaatatttattttgaattatacatttatttagagtatttatttacattagaatagagggaactaaggccgggcacggtgactcatgcctgtaatcccagcattttgggaggccgaggcggacagataacctgaggtcgggagtttgagaccagcatgaccaacatggagaaccatgtatctaccaaaaatacaaaattagccgggtgtggtggcagatgcctgtaatcccagctacttttgggaggctgaggcaggagaattgcttgaacctgggaggtggaggttgtggtgagcagaggttgcagtgagccaagatcgtgccattgcactccagcctgagcaacaagagcgaaactccatctcaaaaataaagaataaagggaactagccatctgatcatattacaaccaaagccttttattttcttcataacctaactgaatgtgtcaaacagtttgtgattctgtcctccaaatatgcatgtatattccaaaagaatctgtgaccctcagtaggcctgtttttaagtcagtgaactaattctttctttctttcttcttcttcttcttcttcttcttcttcttcttcttcttcttcttcttcttcttcttcttcttcttcttcttcttcctcttcctcttcctcttcttcttcttcttcttcttcttctttcttcttcttctttcttcttcttcttctttcttcttcttctttcttctttcttcttcttcttcttctttcttcttcttcttcttttttttcttgaggcagggtctcactctggactctgtccaggctggagtgcagtggtgcaatcatggctcactgcagccccaaactcctggaccgaagtgatcctcctgcctcagcctctgagtagctgggactacaggcatgggccaccatgtctagctattgttttaaattttgtagagaaaagatctcactatgttgctcaggctggtcttgaacttttgaactcaaccaatcctccagccttggcctcccaaagttctggagttacaggcatgagccaccatacctgctaactaattctgaaagataagtcatagtattgaccataatagtgatgaaaataagtggaatcccaggaggaagcctcatctgcatgtggtgaatatgtaacagtaaagaggatgatcatagtaaggctttctactgtgcatagcatgttagcttttactcttgcttttacatattcatctcatttaaagtttttgctcattttaattattctatgatagatatgacagaggcagggaaagtattatcctcttctccctttactcccaattacagaggagtacctgaatcccacagaattgacatatttcctcaatatcagttagtcaacatcaaagagacttgaactgctatagtcattatatgcagtcttaaggacacactctccacattttaaggtttaaggatggataggatttccacagaagtataaacagaaaaattgaagacagaggaaagaatactggacaagggcaaaaaaacaggaagtatggtacaacttggagaaaatgccagtgagctgctaagctcaggtacaggatgaagagaattagcaggcagatgttgatggaatgccgcaggaagatccatcttgaatggtttcgtgggaacatagactggatgtgtgatctaagaaatataagactagtgggttagactcagcaaggggtaatgtggagctaagtttgatgactatagatatggaaagactcagggacagatgctacagaaatttcaaagttttgataccatattacacaaactaatatggcgcttgaaaaagagtgagacatctaagatgattctcaggttcgggtctgaatgactgggagaataatgatccaggaacagaaatagggaaatcatgagaagatgctaaattgggaggagatgctgggtgtgatttgctgagtttgagtacaagcagaccatgcaagtagttatgtctaacttggaagcaaagtaatggtgtgcacctgtagtcccagatattctggaggctgaggtgggaggatcaattgagcccaggaggtcaaggctgcagtgagccatgatcccaccactgcattctagcctgagcgacagagtgagactctgtctcaaaaaatgtaatgcaatgcaatgcaatgcaacgcaacacagcaaaacacaacacaacacaataaaaataatgccttcagaacctcccccccaaaaaaaaattctaggagggaagtggggtaagcctagtgaaaattctcaggctaactgacaatgtgtatgttttgctaaatggacttcagttggcaaatcaaatttttgagttagacattaataatattgaaatgtaatatccacccacattgtccatttcatagaattactctgtttttgttgttcattttgacatttcctaagctgtcacttgacccagactgacacattatcatctgcatgcacctaggctctgccttatatatgtttacaacatgcaatgaagcctagtgcctgtaatcagaaagagggtgctgcagtccatcatgtgaaaaaagagctggactatgaatgaggaaacagattttactctgacatcaaggctggccgacagcatctgtcatgcccctaacacaatcatgctaattataagccatcactttcattcttcttggaattcagaagtcaggagggttgtaggggcaaatttctaacgggttgtggaatctatcattgctaggaccttttacaattcagttgcttactctttttaaaatctgccattcagcagtctttttcagtaccagtaagccacgctatgcattcctatgaataaagtgcacagcaacagcatccaaatgcagtgacggaactgtatggcttctccttggaatagcttttaaaaacctgcttaggcagggacactttattgcttgctgaaaaattccaaaagatttgtgactatgtttaataaattatcaagaactatatagaattccttagaccttttttctaaaataaacttttggagattttttgtttgttggttgttactattatttttagagaaaggacaattaaattatcttcagatcccagggaatggtagaattagtctttttggcactgatagtaaggtaggtcatgtcttagtccatttggactgttacaataaaatatcataaactctgtagcatggctgggcacagtggttcacggctgtaatctcagcactttggaaggccgaggccggtggatcacctgaggtcaggagttcgagaccagcctgggcaacatggcgaaaccccatctctactaaaaatacaataattagccgggcatggtggcgcatgcctgtagtcccagctactcgggagtctgaggcaggagaatcgcttgaacccaggaggcagagcttgcagtgagcagagattgtcccactgcactccagcctggccgacagagggagactctgtctcaaaaacaaacaaaaaactgggtagcttataaacaatagaaatttatttctcatagtgctggaggctggggagtccaaagtcagcatgctacagatttggtgtctggtgagggccaggtttctggttcattaatggtgtcttcttgctgtgtcctcacttggaagaaggggcaagggagctataacttggaagaaggggcctctttaatatgtgcattaatcctgttcacaaggctggaggcctaatgacctaattacctcccaaaggccctacctcctaacactattgcattggtgattagatttcaacatttgaattttgggagggtgccaatgttcagatcatagctggtcatttcagcttatttgtactctctaagttatgctgcaataattgttggcttctgtacatgggcaatatggaaattaaagcaatcataacattttggtagaggacctgaggagagattattctgaatgtgatgaagttatagtctttttcctcaggtggattagatcactttttggatagaaattttatgttgggaaaaataaaaatggttcagtgacctgaggcagaaaaagtctgttcacaggaatataagataattactccatcaactcacagttgtttggaatgtcaggatcaataatagtcctcagaacattgtaaccttactccagcaactatgctaacataaagcagagaagtctgaagtctgtccattagtattggtgacaaggtcatggttgcttttaaactttgcttgccaaaatacctggagggaactcaatgtgcatactcaagtttctgctgtggcaaattgactgttgctaccccaggagaccctaggaagacaatcagttcatgtctgactggagacattgcaactttatttgtatgaactatttgggtcaaatttcagggggacatgtcactacagaggggcagagggtcatgataatgaaaagaatcattacgttatattggtaattagatgtatgactctacaaacttgtttttccttgggtgttagtaacattctttttggagatagatggcattttacaaagtctatccacagaaaactggaagtatctaaagataatgataatgacgagaatatattcattgtaatctggcatacagaattttctctgccatttaagaagctgaatttcttttaagtatagaaaggttagacttatcaaccttatttgcagatactatttatgtttttcatgttttctctctgtccttaaatattttctgagatttaggcactgagctctctgctagacattttcaaattttatcttttaaaaaatcagaaaacctctctttatgaatgaaatttttcacaaaactctgatatataaaacaggcaaaatgaaaccattatggcaggaatgagtctgggatttgcctatttatttttctttcttctttctcctgtctgctaaattttctacaagcaaggcaagcagttcatgaatcaactgttgactacttctgaaacctaaaatgaaataatatatatgaaagctgttattcagtgatttatacttatcaaaatatacttgtcaaaatattaactgatttgtgtttgtcaaaataaatatattcatacatagcaccttggtaaatcacagatctagttgtattgtaggtgcctagaccaacatgacaacttgattatatggcttgagatatttacatcactcttaccacaaaaacgtcaataaacagagcttattaatcttttgaggaggaggaaatgaaggtgtaggaaagcatgtatgaagttctacagcatttgtatacatccatctttgggaactgagtgagcaaaaaagaataaaatgttgatattagcatgaaaactctcactaactctataaatttcttgtcaatattaggcctgtttctaaagccaatcagaatgaaggaagagctttttaaaaataggcaaatgttggttacattggcttcaattttaaaacaaagttctacattctcttcagaatgcgaaggaggttgaaaaaggaggcatttcctgcatatattttgagatgagacgagggtgagaaaaggagtagagctgaatgttatgttattctgttaacctttgtcaggcccatcaggctttatatggttcaaatttctgctgtatattttgatactttctgtctccacagcagttactcaggaatatatcccaataatgacactgaaaatgcagtgaatttataaatagatcccgctgctgcatagattccattatttagaaaattatacagsgttctgtaggaggttgaacatacagtaaaatagttcatttgcttagaaacaattattataattgttattataaaatctaatagattattagaaatatcacaatataatcaagcaagcatcagactaaataaaatgattatttaatatttgcttcatatgataaagaaaaacttaaaattgattttctatttgaaaaatatcaacagaggctgggcacgatggctcatgcctgttatcccagaactttgggaggctgaggcaagcggatcacctgawgtcaggagtttgagaccagcctggccaacacagtgacaccccatctctactgaaaaaaaaaatacaaaaattagccaggtgtggtggcaggcacctgtaatcccagctactctggaggctgaggcaggagagttgcatgaacccaggaggyagaggtcgcagtgaggcaagatcacgccaatgtactccagccttggagacagagtgagactccatctcaaaggaaaaaaaaaacaaagaaaaatatcagcagaaataagtgagttgagtaatttctaaatcttatttcctatgtaagtggttaagaaataattaacttttgttctagaagtattaaggagacaaattgcaaaatttaatgtgaagccttggctcacaataaatactttctttaaacttaggatatatttaaagtggaataatattttccaacttaaaatgtaaccatttatttttttctttaatgtgtttgtgtatacatctccttctttgtcaaaggtttgagtagaattagaaatagctgcaatttacaaaactctattttgaaaggaagaaaattaataataaatagcagaagtaaaagttatctttctggaatctaggactctcacccactctcatcttcaatatttaccccattgtttcacatatggaatattataaaattaaaatataagagaacggatatgttattattcaaattattttcattgagggtggtttgcccagtttcttagaagcaattaaaaggagaggataaggtggttttcttaaaatagtgctttctttctgctgaatttatgtaacttttttaagaatggcaatctaagtgtacaaatgatgtttaattctcatgagatttcattttaaaccttgctttagagtaaactttatgagtaataagattatacgtgtgggaaactgaaactaaaaggattcaaatggttttgacaaacaacagatattcagggtcagtgcaaataaggttacagataatcactccatctgctccattgtcagcaaaaatgaggcccaggtgttgcagtataccttgtcctttctcctgaattgtgaccattgacaaataagattttcaaagagaagtctgaattccttagggtttagcctgagctcttgtaagagtttctttccagccaaagtattttcttgttttcctgtcaattcaatgggttagaccattccatccattagaagaaagtagaggaaatggctcaaccttgcccagagtacagctggttggaactctgacaacggaactgtggcccagggtaaagagcaagaggctgggggaagcacgtaatgcttcttaaagcctttgatctaaaatgacagactgtcatctccactcacattccattagcccaagcaagttttgtggctaaccagacaatgggtctcagcaatatatcccccctcccagaacgcctgaacattcaagtggcaaaagagtgaattgttgagaacaataatatagtctataatagcatataatgttcataaaattagcaccccaggcaaacaggacagaatgcctatccccagccacagctttatcctggcctacaacgctcatttatactttctttcctgtgtgaaatgaactacacttagtttattttaacctgatttttacaaacccataaagaatgcaagagatgcagtgggccaggaagaagtgagaatgttgccctatgtgtgattttttctagaatctgtctaagttctgctttattcctggatatcttgatatggaaaattaataggattgcatggtaacttccttatacacaagtttatttacctaatttagctcaggagtatgactcaattactagcaacctaaacatgcaataatgaagggaatctccatgttgcttatgcaaacatctagagtcatatgtcactttgtaagtagacaaaatgtagggcatgtgggctggacatgtcaacatgctgctgactttatctgtcattaatttttgttgtgtaaattagcatcctaatgacacacccccactgtattcattctgtgccctgtctcgccccttaacttggagcaggtaatggagtttttaaacatcatttgataatttgccctcttcagaaagtaatactaaggaaaagctatttaaagtgagcagaattccttttatctgttgatttagaaatattatttatattgccagaaatttaaaatgttcaacatgtttatagttattaaaactttgtaaaagtaaagtatgttaaatcttcaggagtatcactggaggagctagatgacaaaatatatatatatatatatatatatataatattatcatgaaaatgcagtgctggcaaactgctcctgggattataaatatatcagtaaaaccaccctttctcctgtatcctttcagcattagccataaaatagactggccagtaggggttactcttggcattatgatctaagagtggtagattagagtttgaagacataatgagtggtatttttaaaaatagctattatcgttgtgaatttaggtgcaatattcagaattcagaattggtgataacttgctttgagcactgtttcagcagcttttatcctattcatatgactgtcagacatattccaggaactattttacttagccttgttgattgtccctcattaaataaaatccacaggtcaaaattgtaaagtagccttttagttcaatttggcatctttttttcctgggtgatattctcagtcccaggggtttgaattccagacatccttgaaaacaaagccttatatgaatgtagtcagaactaactctttaaaaggcaaaagcacaaccacattcagttaccctaaagtaactgtagtcaggtggctcttcaattttagaaaataaattactttcaaaaagaagaaattagaaaagggaggaaaaaaataatgaagcctcatggacatttgtttttgagagagaaaaaataaataaaaggaagtggttttaaatattggtttcataaaaacaaaacttagaaaagctttttgtctgaagcccaaatggttacaaatgagctctgcttactaaacatggggcagaaagagttcattagaataaaatactattaccttcagaagaaatatgtattaccaagggatgaaatgcaaaagttactaattcaatatttatttatttatttatttatttattttggcgacagagtgagactctgttgcccaggctggagtgcagtgctattatcttgactcaatgcagccagcctctgccttctgggttcaagtgattcttgtaccttagcctcgtgagtagctgagtctacaggtgtatgccaccacacttgactaatttttgcattttcagtagagatggggcctcgccatgttgcccaggtgagtctcaaactcctgagttcaagcaatccacccatctcggcctccccaagtggtaagattgcaggcatgagctaccatgcccggcctacttcaatatttattttttaataaatcaagtttgttatgagagagttgtcagagaataggaatcttctaactgctggtatcttgatgcattcagagctcaaggatgtgtggtgtggttcagaccatttcgtgcacactgtagcagaaggattgccctttgatggctgggcaagggaacattatgatagatgagttatcaaaatattgctaaaattctttaggcagtttgatatagatgttactgtagctggacactgtcagagaaaggagatagctgtaacagagtaccaaatgaaaaacatttttgaatagactgtccttaagacttcttacctacgaagactcctaatctcttcttatgacataattatcggaaaggcctggaggccacaccttgagaagaaaagcacttatcagttgtgattttcattttcttcacagttttctccactcagctagcttacagaggaaaccaaaatgcagttggttgtttctctttactaacactcagttcctaagtgcttagctttagaagttttttctgcctgtttacttccacttcttgtgtgacataacaatattttagggttttatttttcttttcaaaattcttctggtctttggaaagaaaattaagacactatttactctatgtttgctgatgcagaaccagtaagtttgttcacccacccaagtgattcattctaagcaaattctcccattaggcatttgttgmaaatctgcaaaagttgcttttatttactgattcaacatatcccttcccagtataaggatctcctttgacggtgaaaatctccttggattgcataggttttcattgtacagagaaggcttgaccttaaaaatttaagtygcattaaaatttcttttatgttttagagagacagaggcactctgttgcccagactggagtgcagtggtgcagtcatagctcaccgtaccctcaaacccctgggatcaagtgattctcccacctcagcctcctaaagcattggcattacagatgtgagccacctgcttggctgaaacttttcttgaaacacacacacacacacacgaacactcacacacacttttttatttataaagatctcaaccaactttttaaaccatgcaataaaggaatatctttggcattggcaatgtatatttgttgactgctggagtcctttgggcaacatcaaacacccaattgctcattttaaaatctggctttccacgcctgtaattccagcactttgggaggccgaggcaggcggatcaccaggtcaggagatcgagaccatcctggctgacacggtgaaaccccatctctactaaaaatacaaaaaattagctgggcgcagtggcgggcgcctgcagtcccagctactccagaggctgaggcaggagaatggcgtgaacccagaaggcagagcttgcagtgagccgacatcgtgccactgcactccagctggggtgacagagcgagactccgtctcaaaaaaaaaaaaaatctggctctccattttgggttcttaggtagatggaatagagtttccagacttgagggttttaattcagcaacccaggatcaacactttctaggtgtgagactttagtaaataatatactcagagattcatggtttttttttaatctataagttgcagaaaataatatcactatcatgcttttttaaaggattaaataagatatatttaaaaatttgttatccttatacctggcatagagtaagcgaacagtaaatggtatatttgtaattattcttttttacgttgctttctacttaatatgcgtttattaagcttcaccttaagtataatttagcaaaggattatttcagttttcccttaaaccagtttataagtttacatagggaggttaaagccaacaggaatttttatgtaataaggaaattcaaatatttcagtatctgtgataagagttgtgttaatttgcagaggaataacacaaaacattgattaaatttggattgctaaatgttaaacagtgtttgtacaataaaagtgtgattcagaaaaagccttattataacatgcggaatgtattagcactctttggagacttactatcttttaatttattttattaagctgctgttgtgagctaactaataacataagtgtgaactagtttgaagaagaattgcgattttattgaataatattctgcaagaattaaatatcaataggttagcaatatctcctcattgagttaaagtatatagattgtatacatgttctatgtatatactatatataaatgtttagatagtatatatgaatggcataattactataagcttacagggaaatatgcagagttgctgttatttttagaaagtaaatgatgacatttattttttatctaaaactttaatctgttcagtgatttagattcatttgagctctaatgatttggagagtaaggcacaggcatagccttaatttattggtgatgaaaaaaatctacttattggcaagatgggggaaaaaatcacaagccttgtatggaattgtatgattctgcagagttgcaatggtgttaacaattgtgacaagttacactttctgagacaatcttcaattttagcaattaaaatagcaaagaattattatttataacagtattcataacatagcaaatggtcatattccttatagagacagcacttccgagtagtctttattttgtttttcaaatttgtcctttcaatatctcaaaatatcttgtgttgcaattacatttccaagtatatatttggttgggatgaaaatagctgtaatagtagtagtagctaccatttattgaattcttgccacgtgcctcatattttatgtggtgtatttgatcttaggccttaggacaactgtaaaaggcaggtattgtagaagacaatgttttctgagagactgaaatgacaaattagaaaaaaagttaaagacttcttggaaatgctatctctataaggaatatgaccatttgctatgttaatactgttatgaataataattatttgctattgtaattgctaaaactgaagagtgtctcagaaagtataatttatttgtcacaattgcaactctgcagaatcacccaattccatacaagacttgtgattttttcccctaacttgccaataagtattattaccataataaatatgctgacgtttcaaagtttaagaaacttcctacagttctcacacgtagtggtgacaatatggctaaggggttaggaatgcccacatcctcctatgctgcatcctgcctgtggtttagatttgagatagggacccctactttctttcccctaagagcagatctgtgtcattggctataactgctttctggtcagccacatgacacgtggacttaacagatggtttctaataagattgaaagcatatcttgactccacttacctggccagcactggagaaaggaagattaagagagatttggatgagtgtccttgtcacataacttcccctccctagaaaacttggtccaatacgttgtaatctggtggtgcaaactcacaacttttcttcccttctgtgagtgtgtatatatgtgagtttattgtatgtgtgtgtaaggtgtgaatgtgtatgtgaagtctgtgtgtgatgtgtgtatatttgaatgtcctgtgcatgagtttttttgtgactgaagtgtgtgtgaggtgtctgtatgtgggatgtgtgtgtctgtgaggtgattgtgtatgaggaatgtacatctgtgtctgtggtatatagaaaacgtgtgtgtggtgtatgcacttgctgtgtctgcatatgcatgaattgagtatgtgacttgagtattgtgtgtgtaggaggaggggggaagtaaaaaggcaaggtgacagtagagactggacaaatgaacatagccgggcactattcctttaactcctagaacagacataacttgaagtgatctagacttgaactttggagtatgaagttccagccagctgtgtaactatctatttaatatttggaagcgcttagcctgcttaaatcttgattttatcatttctattagagaagttttaacttaaatgctctaaggtgggggtgtccaagggagaaaatacagtcatgggttcttagtttctgtttctggttgggccagaaaagctccttcctcatccctcttttccacttatcaacagagacagaagctaaaaaccatggcttctggctgctaaagcctaaaataaaacaaaacagaacaaactcatcaacaataacagcaaaataaagcaggttggaaatgactgctctaagggtgaagtgaatatgttcaggttggagttactgataagttgtaaacaattacaaggatgtaaaatattgcatatttttattagtggcattacttttccaacattacattttatattgaagttccagaacaacaaaaaaacactaaaggtattgcagtgaggaacttatcagtaagtgcttctaccttcaaggaattaagttaatttttattggcaatatttggaacattgtatcaagaagaaagactagctaacgaatctcttttgcacatcaagctcttacagtgttaattcattaaacaactaagacaattttaagtaggagctttggtctaagatgtgtggccgcaaactgaaccaatactgacagaatttggcattaatttttttttcagagaattttttttttaatatatggcaatggttgaaaaaaaacatagaatattgtagttcctcaaattgttaaacacagagttatatgatccagcaattctacttctaggtatatacccaaaagaattgaaaatacatagacaaatgttcacagcaacattattcttaatagccaaaaagtggaaacaatccaaatagccatcagctgatggataaacaaatgtggtatattcatacaatggaatattattcaacaataaagaattcagtatcaatgcatgctattacatgtataaaccttgaaaacattatgctaaatgaaagaagccggaatgacataatttcatgattccatttaagtgaaatgtccactatagacaagtctatagtggattaatgattgcctagggttggagggggtatggggaattgaagattgagggtcaaagggtttggggggtgtactgaaaatattctaaattgtgttaatggaggcacaactctgtgaatgcactaatgtcactgaattgtacattttaaacaggcagattgtgtggtatttcagttgcatctctataaaggtgttaaaactaaatatagaacaattttcctaagtagtggcccctcctcatttattggaccaatagtttgggaggaaccagtcatgaccttcctgatacaaatcaacacctacagataggatgggaggcaattgtgctaacaaagtacctcaaaccacaaagtctgtcagtaaactgatgcttttgtcaaggatgaatgaccaggggcaggtaataggtgagcaactctcaactcttttgtatatggtactatagtctggaactagcaagtactgaaaaacgctagatgataaaagtcattgttattttattcttccctctcccttcctcccctcccctgtgctccctttcctcttcccattttatttatttatttgagacttggtctggctctgttgcccaagctgagttcagtagcagtatctcagctcactgcaacctccgcctcatgggcttaagccattctcacacctcagcctccagagtagctgggaatacaagtgcatggcaccatgcctggctaatttttacatattttgtagagacggtgttccaccaggttgtgcaggctgggcttgaactcctgggcttaagggatctgcaggcctcaccctcccaaagtgctaggattataggggtgagccaccacacctggcctcccctccctttttcccctcccctcccacccttctcctctccccttctctctcttcccttcttcttctttcccccttttcctcttccttcttccctcctstctttccctttccactcttttctccttccccactcataaatagatattataatgaattaatttagaattatagttaagcatacatttgaagtaattgttccaatttcataattttgaagtattttctgagaataaactgggcaaatgcagaattgggacaaatcctatgtgcaataattgctaataggaagtgttctgaagtatgaattctctcctcctttcttgtttgacttgtcactgaatctccagtcctacagagtactatgtcctgcttattgtttatttataccacaccccacttctacgtataaacatcactttcactacggtggattcaaatgatctcttaggaatttagttacattacagtctcacataaaattactgcccttaaaaacatttgtttgctgggcagggagtggcgaaaccccatctctactaaaaatacaaaaattagccaggcgtggtggcgggcgcctgtagtcccagctactctggaggctaaggcataattgctttaacctgggaggtgcagcttgcagtgagcagagattgtgccactgcactccagccttggcaacagagtgaaactctgtctaaaaaaaaaaaaaaaaatttttttttttgctaacattatttgaagaatagtcagttcagtatgcatctatgtagacctaaccaatagttgtattttacaagtttcagttttgaaatgttggatgatatctttcagtttaaaaaattagtatttctataaagtgtctttttttggatggaaatgtttctggaatgtgacacttaaattttaattactattattaaatatcaatggatttgttttgcataaccaaacagttggataagttcagtttatgtgctgtgcaatactaagatatttacttggcatggagagaatcactggcttactaaataaaagaattcagcattttgtttgtcaatcctatgttaattgcatttatatttctgacagtttccttgatggaattaaaaaaaaaaaacatgcaataagatctgaattgagtgttgaaatgagtgtttcctgagctccaattagtgaaagtattgagatttgaagaatggttgaggagacaaggttttataattgcccttctgggaaaaagaatgagtaaacaataaagtcttgagatctctcaaacaaatatacagtcataaggaaagtttaaaagccacagtgaaatgcacacctcttaattatgttaacattgatatctattttaaattgatatcaatattagctgtgaaagtttcgtatattttgcagggacaaattctcttagtgtactccaaatgcttattgttacacatcctgagcacacaacgcaaacatattgggcaagcaaagaatctaggctgatatgtgtgaatgcttatgtggcattctatcaaaggagatagatgtacataaggggaattatggagaagtgaaaatttgtctaaggttcattttttcagtagcttaattttaatagtaaactcttttaaggaatgaatggccacaggcagagactaatggtgtactttcagtgttctcagtgagtgcttcacagattaggtttccaagagaagaagattgcctctgaggaagaagagatggggtagcaagaggcatatatgagaccgttcttgggaccaacacctatggaggggagggaagaaggcagaattatgggaccagatagaagaagttggtctgcaatgcagtcttgaggaaggcctcagcagagccaatagacagttccgaagctggcatgcccttgagagttgtcctaaattcgggtgagagggttaggcctttatatccttggtcacttgatagtagatgctggaacaaaatggtgctctttagctaaggcaatttacagagggctgacagctgagagcacttgtagaatctaggaaaatgagtctttcattcttgaaggggaatcttcacatcatccactacaaatggtgctatattttggaaccagcagacactgagaaatgccaggtggatagaatccttccttcttttattctatctttttttctttctttctgtctcctaatctagtgcttctccaaaaatacttttaagaattagaattaggccattagttattataaggaaggaagggaaataatcattttcataaaactcagcaattcttttaatgtcaagatatggattattattacactcaacaattataattattaatattttccacggaaaagtttcatatattgaatgacccaagtactccatgtgaccttccctgtctatgtaagcctagcattctgtcagccaaataaaattttggaaggaaggtcagataaaattattttttcactcggtgttaaagaaaagaaaaaataaagaacatttattgagcatgcactaaatatgacataaaagatctttgttttctgtattagaggttgagaaagaatgaaacagtctattgatttgaaaagctttgctctcatttagcaattattattattattattattattattattattattattattattattgttgagacagagtctcactctgttgcccaggctggagtgcagtggcgcgatctcggctcactgcaagctccgcctcctgggttcacgccattctcctgcctcagcctcccgagtagctgggactacaggctcctgccaccacgccaggctaatttttttgtatttttagtagagatggggtttcactatgttggccaggatggtctcgatctcctgacctcgtgatccgcccacctcggcctcccaaagtgctgagattacaggcgtgagccaccgcgcccggccaacaattatttttataaaataaaagtttattaatgaatttatacaaatagcactttataaaaactacaacacattcatttgggctgggctgttgcctggttagtcacattttttcttctttatttagctattgcacagcttctgaggcaaccacaaaaacatcaaattatggagaagtgagtgcatagatatatgaaatcaacatttcaaattggtaatagaatgaccttacttattaagtagtgatcttttatcaagctgctacaataaaatcgaccataacattaaacatggtagatgttactaaccagaaatcttaggtatttaaagttatgtttacttattttttttaataagacttggaagtgtcacttaaatcacacttaagaatggatattggctaaaggctgctgagtcttttaagattcctgtgaatttttttcagattgttcctcagtcaattcaggatacttgtcattgctggctatacagcagagtgcagagttagcccttgcagacacacaaagataactcaaggcactgatttctgcatcttcagcctcctcatttcattaactattaaaattaattccctgtagagataatttgcatcaatcaacagaatagaagaattagaagagcttctgaggcttttctatgactaaaagagcaattcttttattgactaccataaacattagatttactaaaaggaaaaggtgttttaaattgaaccacccctctaatttattcatcttagttctgaaaacatgtaggtaagagttaatcatgttactgaatctaatttaaaaagtgagagggaaagtactgaatatttttcctctttgaaattacatgttgtttgcaatattagcctgcctgtatttttcatgtaaaccttttgtacattgaaaacaaattcaaaataaagaacgtttgttttcaggctcagaccttaagaactgatggtcttttcttttacttctacacaaaagtctaagcagttctgaagaaacactacagtgacattgggtcattgctaaaaaaaaaaaaaaaaaaaaaaaaaaaggttcacaaactatcaacattttaacaatctaatagttgattgttgtttcccaaattggtgattttgaatgattattttatgtagaatggaactgtgtctttttcttcattcatgcaacaaacatttcctgatggataccaagcaacggtgacaggtaagcatgccatcctagatcagtgttatataactcccaagcttcagtgaaggcctcatttttgttattacaaactgcctctctgggacctcatgaaggtactattcctgtttcgggaataggtctatccatccttgtctttttgtttcctgtcttgattctacaatctcccctttggccattaccatctcaaaatcctgcttcccaaggtaatccgtctagcttttctaatcttctggcttcccattactcatttcaattccttcttctggctccctgttgctttcctaaccaatttcaattacttatccttatcttgaaggccattcaccactctgccctgctgacgtgtttttcttatcacccaagattcctcccccggctcacacttctgcatgcaagcacgttcccaaagtatgaaaatgctttggatttatatcatgctgttgccttgaagagttttattctcttcctcatatcttctcagagaagaaagtaatttggctgtggttcaaaattcaccaaggcagtaaaatcttgtgttttgtacacaacttcctttctaatgacctctccctttcttcacctcacattgggcattcactcataactatttaagggccttctcttaggcggctgccctgttttcaggttgtgccctatgtggtcacaagtggctattcttaataaatcatagaatcgtagaatttaagtactgacagggatttcctatatataagaatccaacttcctactctgcagaaatccatctcagaacattctcaatgcttaaaattgccttttcgggagagaacatcaactcgtaagacaagctctttccttgttgcctaggactcatttttagaaaaatattctttgtaatgaattgtttccctgccacttcctccctttggtatgaggcatgttgccagaaagatacaaaataattctaataatctttcttagccttgataatgcaagagaatacagcaataatttcctccattaaaccttatttttttttttttttgaggttagatgcctaaattacttcaaggattcttcttgtggaagcatttttgagaattttcttgtctttctgcacctctgatttggtaacttgaccagcagacttcacaagaagcttgctgtcagtgttagtccaaacacaacctatcagttagtgtgtttagtcattaatatttaagagtgttttcataacctttaaattaataattagtcatctttattctttaatgactacagaagctcacattcatagtattttggtaactaaggtatccataggctcaaaaactcttcaaaattattgtgtaatgaaaatgttaaccatatttaagagagtgacttggaaaaaggccttgtttttcaatctcatattttgaagaactattgagatgtcactgaatagtatttttagaatttttgaattgctcacacatgagcacttggggaattggtcagtgaatatatctcctgagcactttgttccttgaaattatcaaatccttcttggaatttctttttctctctctcgtgatgtgtgggtgggactgggacattaccaacacaattagaacttcatttctttttcttcttagtgaaatttattttctaaaaggtttgtgtgtttcactctattagcagttctggaatcatccaagagtctaagtagatgtagcagagctcttatggaaactctggatatatacataatcacacagagaatttgtatttaattttagagttacatgtaccactggaatcacattcatatttctattacagtgtagtgattctgggttaagaatcactgatttagttctacctcattttacatataccttttcctgcaaagatatataaaaataaaatcatatgaataagttatgtgtttaatagttccattcagtcatctcataagacaaaattactttctaagttaattttaattcagatctttatagaatattgaggttttaaatgtgaacacatatatataattttatgatacaaccttttcttctgaatacttaaagtgttttcacagttggaagtatcaaaaactttgttctctgtaaaccttcagcttccawccttcttcagtcttatctgcagttatctcctgcacatgtaaatgatgtggtagaagatacggtttaagatgaattttagttatttaaagtgtgtcataacctgaacattttacagatatatttaaacaggtataggtatatttaaaatcactattttaattaaaaaaaaaaaaactttgaaaaatccctaatttcaaaaatatatttaaaatgtacatatatgaataatatatagagaaagataggaaatattaccatgaattatacagacctcagtttatctaaatttacagttttaaaataataatcttatccttattatctgaagatgtcattgatgatatgtttcatttttatatttggctttagtttaccaatattaacatataaattattaaacaattgtacaccagctttgtggtctctcctttgtcatgtgtgatttgtgtaatttgatgaacttgatgaaagcttccatttcaacttgaaggctgtgaatatgccagattatgtgcattttgtagtaaggattatggagctgaacaagtatgacagacttgttaaatatgttgtctacaaatttttttttgtttttgtttgagatagagtctctctctgtcacccaggctggagtgcagtggcgtgatctcggctcactgcaacctccacctcccgggttcaagcgattctcctgcctcagcctctcgagtagctgggactacaggctcgtgccaccatgatcagctaattttttgtagttttagtagagacagggtttcaccatgttagccaggatggtctcgatctcctgacctcatgatccgcctgccttggcctcccaaagtgctggaattacaggtgtgagctaccgcacccggcctattgtctacaaattttatcacttttggtaagaaatgcacaaagcctatcatgatgtcattgctagtttatatgtttgtgaattttaagccaaacaagcgttcaaaacgtttgccacaaatcgaggacctaaaacccagttttatatataaagatatttaaaaacatatttctggagaactatgcatatactaccaacacttacaaggcaaattaaattaaaaatgttgtataaggaatataatattttaaatttttagtgtaatcaagaaaaagatacattgttttatcaattgattaatttattggtcataggatttggcctatttatatttctgagtatccaacagaatcagtcccttaaaatgctgaatatcacaatttgcagttcggctaatacatttatatccattttattacttagttgtaatataaaggaagttacctcttcatatcccagggaaactatggtagttgacaaggagtgggtccaggctttataccaactgatgtcttatacaactcgaggagtcccttttaagagaaatggatacatcattggaatatgtattgaatgtggagattgaatatttatttaggatgtaaaactaaatcacaccagattataaaattaataaagctgacaaattctacaaggataacaaaatttataaaattaacttcattttcagaaaattaattgcttgatacatttctatgatttttttggctctgtagttttggttgcttattctctgattgcctcttcattttacatgattctattatgttttctatgttgagaataacaagataatgcagtcttttctctagtataattgattgtaatctgtcattttattaccgatagtttagaaaagttacatcaagtttctcaatttttgggggtgatttcatatacattcttaggactgtgaccaaacttgggaaatatctctatcaaatgtctttcatttgtgaactgtaagatttggaagaattttcaaagagcagttcctggctttatatgttttgaacattgtgtctccttcactccacacagacttgtggtgcctgaagctctgggcacattgattttggagtgatctctgggcttgcactttcatgttaccagcaccatggtaatcaggtgtgttcgtggaagctacacccagacagccagcaagaacctaagggtacagggaagagactgagaaccacaagaatataatcacaccaaactgaaactaaatgaatctttaactcagtttctaattagccagatcccaaaatggcccacagtcaccccagtgctaactaacccaagggaaaagtgtgatataggcaaaatcagtacgtagacattgatcttaaacttctgcagttaaaatgtctcactcatgcaaaattctaaaagcaaaggagcatgccatcccacccctcgagccttttccagtgccttaggaaggagcttgtgcaagtgaggggccctgaagcttcacccttcctagcctcacggtaaatccacctctgtggtagacagaaacatttctagaccacaggaaatctgtttgcctaaggaaacacagaagctgtccttacagttaaacagaaatagttctatttttttcctagagttcagcaccatttctcaaggggtatttcttagaagttcattttatgaagtctcctccacaagttctttttgatagccaataattcaaatgtcatgctacttctttaaatcactccagtcattgaatagcataatcttttcagggggcaaacagctgggctccagtaggctttaaatgttcatttgttttccaattttttgacttgcataggaagaagtaatccctttcatgtgaaatattcccctcgattaattttaaagaaccaatggcattgtctgataatgggatgaaagcccaattcactgaacagaatgtgctatttgtaacctggattatcctttaggtttttcggcatagtcctcgagaagctgagaatctgtcattttattgattaaaatacacgtacagatacacacgtttacattagaaataaaaatgttgtaagctcaaataggcagggtatttcacctgaaagcctgaaataaatgtgatgagaacctatgaactaagttccagtgtaaacaagtgggttaaattctcattatagaaacttccagtgagcaatgcagcatgactgtgggaccataattcaggaacaatctgcagagcaaaatatagaggcactaattttgttatatttgcagcccacatactgtaataccagatttgctcctgttgttctggccaaagatgagtcaggtacctctgatataaccattcctaaaagacaacaatggattcagaatgtgagactgagagaaatcctagaagtctgaccttcagatcagtttaactgtagatcaataatccattactcagaccaacacagtaccaaaaaatctcttcagctggctgccaaggtactattttatcttaaataagctggttgagagcagtcaatatagatacatttttcccactgacaatttgctgattcagagaacatgcaacatccagccacgaaatagataaagctcaggcctgccctgtagaatatggtcacctggctttcctgttctcctacaaatgtcctactggaagaatagcccttaatcccttaatgttcatctaaaccaaggcttgttctaaattctctagactctatctcatgcattattacatctctcttggcatacttctcttcttgaagtgcataacatttatataccttctacaaatgttggtattattgatattgagggagggggcagacccaggtctatggccttatgtattattagtgaattacaatttcttagagtaataggccaatgattaaagtcacatgttaggaaaactttaatccactagggaaaacttccaatatttttcaaagtaatttactacatttggatgcaaattatataggtgtttttggtggtatccatacttgctttcttgtcaacctgaagagatgtaaatgtaaatcgatgctaattgtaccgtgcttacacaaagagctaatttgagtaatatcctatcccatcagttcattttcaccatacatttttttctttacaaaattgtttttaaaactccactggaaaaaaatatataataaactacatgtaaattacacaatttagtaaattttgatataggtatacacatctgtgagaaaattaccaaaactgagatagtacacaaatatatatcacccccaaaagtttcctcgtgtctttgtcattccttcctccagctttttcccagaaatttcaccttcctcaggctgatcaacactcagctgaagactcaagagggggcctgtgcagatgtccctgagttccctctctgggccactgtctcctctcttttcagcaaattctagttaccttgacctccctgaattcccagctccatctcctcaacttagggagactttcaggtcaggcagtgatccctcctccttatgctgggacctggaagctctccagcatgtacactggggcaaccataggcgtcatctcattgtattcattttctctaatcaccatgctaagctaactgttgcctaaggtctgaaaactgttgtttcattcattttgtccagtttttccattctttcatgagcaagcataaacctgactcctttgggcaagaagcagaagtccctatagtgactttatttactttattgttattgtcagcatttggaaaaaaaaatgtagagattgactattttatactatttaagtaattttttgttatattgattttacctaaacaagagtttattagaagtattttgttatacagcttataacaaataattgtacaaaaattagaaaaatcagatgaacaaattttttataagacttctcgtggttatagaatgactctaacaccttgtagtgtattttttaggattttgttcttagtgcatgtgttagtctgttttcatgctgctgataaagacatacctgagactgggaagaaaaagaggtttaattggatttacagttccacatggccggggaggcctcagaatcatggtgggaggtgaaagacacttcttacatggtggcggcaagaaaaaatgaggaagatgcaaaagtggaaacccctgataaaaccatcagatcttgtgagacttattcaccaccacgagaatagtataggggaaacttcccccatgattcaaattatctcccaccgggtgtcccccacaacacatggaaattatgggagtataattcaagatgagatttgggtggggacacagagtcaaaccgtatcagtgtatatgtttagagggacatagaaaactatataagtttaataagaatatatacatattgttattaaatgaaaacatttgaaattataaaagtagtaaatattttttagtaaaattaaatatatatatagtaaaaagtgaaagctgttttacttccattcccagagaaaactttacttaaattttatatagttttttccagagttcttcctacacctgaaaaacacagtggattatttttgtgtacaaaagaaaagaaatcattctatatgtatctcctttacttccactctttttctttccacttaattcatacagataaactttaccatttaaatggcctctggtgattcctttataagaatgaaccattagatagttaaccagtttactaatgacagacatttatattgctcccaagttgttgccattgttcatttatttatttctttagtattaattcctagataagttgctacatcaaaaataatgtacatttaatattgcaatagttacaaggaaatctgtacttttttcagtaatatattagtgtctactttcaaaaagctttaaattctgagcatcatattgtcttctaaatctttgacaaaaattaatgtaaatgaatatgctattttaattgtcatttatttatttgattattagtaagatttagatttagatttcagtctttttattagccatttcagagggatgagcattctctgcctatggactttgcctggttttgtattgatgtgttcattgttttcttatttcctcatttgtaacatcattttaaagtgcttttatttctggacaatgtttttacattttttaagactcctattgtgatttttattaaaacaaagttagatytatagaaaagctggaaagaatttgaagttttaacgatattcgctctccctttccagaatatgtggcaaaggagggaaaagaagggattctgaaggaacacacgggaagtcggcagtgtgggagtgatggatatgttcattcccttgcttgtggtgatggtctcactggtgtatacatttgcagtaattgtcaagttgtacactttaaaatatgtgcagtttattttatctcagttacatctcaatgaaactttttttttaagtggcaccaaacatacattaaatagctttcagccaaaagtaaaaactgagtttggtcagaatatttttgtgctattttggttagatttcttctgtcacagttataatggctttctaaaataaaytaggaagccggagaaagtcactttaaccttcaagagtagggaaactgaacccataaaaaaagtgcttccaggtcagactcagcctaaaaaacctgaaaaataaatgtgacttctgagtagcagtatatgggaaaaattttctataaatctctgagaatgaagttgactggagactacacaagagacaaagagatatagaattgccttaaatctgaaccatggagttacagaatgataatggcattatgataaatttttagagaacactcttgataaacaggcacactcaaaaatagctttttgtttgttgttgttgttgtttgttttctgtgcaagaggtgacaattgaatgaggttccaaaaagtagtgtgggcttgcattgcacacatattatcaggcaggatttgtgcagtagagaaaggtgactgaagaatgtagtggaaggacatgctactggaagaagctgccaagtgacatacacagggctgtgagtcagccagggttgaggctctgtccagtgggacagcaggctctgtctccacagtggggactgcctgagagctgggtgctctggttcagccattgtagcacaaaggcacttgtataaatttccgtgaaatggcttgaaacctactttgccataagaatgagataaatttttaattcaaaacttaaaatatcttgattagaataaggaggaggaagagaaagaacaggcaataaaaagttatttattgattgattgacttaatgcagctagctgaagggtgagaggaagaactccggctccagagtctgaaagccagggctcaagtttcaatttgggcatttcccagctttgaacaacagaaaaacactgtttaccttttcagaacctcagtttccttagatctgtaaattagcaataaaaactaatgtgccttccaaggttatggtaaaaatcaaatatcttatgcctgtgtaaatctttttcaaaaaacaatagacactgcaaatattgggcattcttatgatgatgtttattcttcactgggagcattgatggattgattgttacttttcaataactttttccatatttgctctagttttaaatttgcaaattttaattcagtattgtttataataagacaaaagctcttctttaaggttggggcattaatgttaaaaaaaaaaaaagaactgttacatcaaatgtacatcaaatgcagtgactggacaacaaccaaagaaacttcctgtgtaatccccatcccatcacacacacacacacacacacacacacacacacacacacacacactatagacactatatttaaaattggcaggggtgatattatgaactcctgtaaaaccaaattgatttgtgtttgtcaggaatgtgtgggtctgtgtcctggaatgctatatatttccactgtgcactgcccattgaccatttctactaggatgccttgaaggcacctcagactcaacaagttcaatttgaaattcattatgtactccccagttgttcacgctaggagccttcaggccacccgtgacttttctctctccttgagtctctccttagcttcccatggatcagtctctgtaccatgttgattctaccttctgagtatcctttctgctctccctcatctgcacttctgttaccactgcctgagttttggttatgggcttcttagtcttttagtcttttctctcccccaacccagccatcgccaccagcaagaactatctttctaaagcaccaattatctttccaaaacagaagattttctcttctttgtaggaatttaactttagggcatagtcagataaattagccaaaatatatgtgaagaagctgttcatcacaatattgtttattatagtaaaaaaaggaaaaaaaccttaatatctcaaaaatggatcagtaatatcgagactatacacaatagtcattacattggtattatagatgtataataatttggaaatgatattataaaaaattattaaataatgtgcatagaaaaatttgtggaaaatgttttatgctataaaaatatttctaggtaatggaatttagtaagaatttttctcttcctacttcccaccaaacaaaagcaaaataaaactaaaatagaacaaaaattctgctatgtagccctttacaaaagatagtgcttctggcaagaaactgtgactgaccaaaatcctgcaattcagtacctgtgaaatgccatataacaaatttactcatatcctaaaagttatgagaactgggggcttcaggacatctcatacctgcctcattttttcaagaaaatttgttgtagaatcttttatataaaacactatacactgtccttaatccactatgtcctattccctctatttacaaatgtgctttgtccttacatttctttaaaaaaaaaacaacaaaaaactgtgttcacacgtatctttgtaggctaaagaaaagtgatactataaggattgggaggtagagggtgggggcactgaggaagccctgctgccctcaggttaagctccgtatctctctcatttaaggtccctgataggagttacttgttctcaaacatgtgtgttggctctttactgtcttttaagtagcatttatgatgaattccctttttttaatggtggtattacagtatctgatgttaggcatagaactgctcaggcagcaagtcaccttttctttttccccttttttgatagacttgagagaccaaggcagcacacacacactcctccaactagctttgcaatttgcatacatttcgattctggtggkctattcatcatttttatagaaatgcttttatgaaattcgatctcatggagtgagttaggagtttctttgttttttgctttatgataacccattgcctcagtaaatatcttaattattcccagaaaaaaataaacccaactgattagacctaatcccttctcaaatcactttactttctttgtcatttcctatccatcctctctctacactcagatgtctttgttttattatgaaatatatttggcatgagtaacaacattaagtaatatgaatcattttatttggttaaatgtctacactcaaagattagtggagaatttggaaaatataacgaaataatactggaacttttgatatttccctagctacttgccatattcaaaagatgtgtctttgaagtgaagagcagaatagtaccttattatagtccatattaaatcatatttatggctttcaacagaagtattgaaaaccagattcagttgctgcacccatcaactcatcatctacattaggtatttctccgaatgttatcccttcccttgmccccaaccccccgacaggccccagtgtgtgatgttcccctccctttgcccatatgttctcattgttcaactcccacttatgagtgagaacatgcggtgtttggttttcggttcctgtgttagtttgctaagaatgatggtttcaagcttcatccaagtccctgcaaaggacatgaactcatttttttttttttatgtctgcaaagtattccatggtgtatatgtgccacattttcttcatccagtctatcattgatgggtatttttgttggttccaagtctttgctattgtgaatagtcctgcaataaacatacacgtgcatgtgtctctatagtagaatgatttataatcctttgggattatatacccagtaatgggattgctgggtcaaatggtatttctacttctagatccttgagaaatcgccacactgtcttccacgatggttgaaccaatttacactcccaccaacagtgtaaaagcattcctatttctccacatcctttccagcatctattttttcctgactttttaatgatcgtcattctaactggtgtgagatggtatctcattgtagttttgatttgcatttctctaatgaccagtgatgatgagcttttttcatatgcttgttcatatgcataaatgtcttcttttgagaattgtctgtccatatccttcgtctgctttttgatggggttgtttgtttcttgtaaatttgtttaagttccttgtagattctggatattagacctttgtcagatggagactgcaaaacttttctctcattctctagcctgttcactctgatgatagtttcttttgctgtgcagaagctctttagtttagttagatcccatttgtcaattttggctttcgttgccattgcttttggtgttttagtcatgaactctttgcccatgcttatgtcctgaatggtattgcctaggttttcttctagggtttttatggttttaggtcttaagtttaagtctttaatccatcttgagttaatttttgtataaggtgtaaggaaggggtccagtttcagttttctgcatatggctagccagttttcccaacagcatttattaaatagggaatccattccccattgcttgtttttgtcaggtttgtcaaagatcagatggttgtagatgtgtggtgttgtttctgaggcctctgttctgttccattggtctatatacctgttttggtaccagtagcatgctgttgtggttactgtagccttatagtatagtttgaagtcaggtagcttgatgcttccagctttgttttttgtttgtttgtttgttttttcttttgcttaggattgtcttggcaatacgggctctcttttggttccatatgaaatttaaagtagttttttctaattctgtgaagaaagtcaatggtagcttgatgggaatagcattgaatctataaattactttggacagtgtggccattttcactatattgattcttcctatccatgagcatggaatgtttttccatttgtttgtgtcttctcttatttccttgggcagtggtttgtagttcaacttgaagaggtccttcacatcccttgtaagttgtattcgtaggtattttcttctytttgttgcaattgtgaatgggagtttgctcatgatttggctctctgtttgtctattatttgtgtataggaatgattgtgatttttgtacattgagtttttatcctgagactttgctgaagttgcttatcagcttaaggagtttttgggctgagacgatggggttttctaaatatacagtcatgtcatccgcaaagagagataatttaacatcctctcttcctatttgaatatattttatttctttctcttgcctgattgccctggccagaacttccaatactgtgttgaacaggagtggtgaaagagggcatccttgtcttgtgccagttttcaaagggaatacttccagcttttgcccattcagtatgttgttggctgtgggtttgtcataaatagctcttattatttcaagacatgttacatcaatacctattgagtgtttttagcatgaaggagtgttgaattttatcgaaggccttttctgcatctattgagttgatcatgtggtttttgtcattggtttcatttatgtgatgggttatgtttattgatttgcatatgttgaactagccttgcatcccagggatgaagccgacttgatcgtggtggataagctttttaatgcgttgctggatttggtttaccagtattttattgaggattttcacatcgatgttcatcaaggatatttggcctgagattttctttttttgttgtgtctctgccagcttttggtatcaggatgatgctggcctcataaaacgagttagggaggagtccctctttttctattgattggaatagtttcagaaggaacggtaccagctcctctttgtacctctggtagaatttggctgtgaattcatctggtcctgggctttttttggttggtaagttattaattactgcctcaatttcagaatttgttattggtctattcagggattccacttctttctggtttagtcttaggaaggtgtatgtgtccaggaatttatccatttcttctagattttctagtttatttgtgtagaggtgtttatagtattctctggtggtagtttgtatttctgtgggatcaatgatgatatcccctttatcattttttatttatkgtgtctatttgattcttctctcttttcttcttcattgatctggctagtggtctgttttgttaatcgtttcaaaaaaccagctcctggattcattgattttttcaaagggttttttctgtctctgtctccttcaattctgctctgatcttagttatttcttgccttctgctggcttttgaatgtgtttgcccttgcttctctagttcttttaattgtgatgttagggtgtcaattttagatctttcctgctttctcttgtgtgcatttagtgctataaatttccctctaaacactgctttagctgtgtcccagagattctggtacattgtatgtttgttcttattagtttcaaagaacttatttatttctgccttygtttcgttattcacccagtagtcattcaggagcaggttttttgattttccatgtagttgtgctgttttgagttagttcttaatcctgagttctaacttgattgcactgtggtctgagagactgtttgttatgatttctggttttttgcatttgctgaggagtgttttatttccaattatgtggtcaattttagaataagtgcaatgtggtgctgagaagaatgtatattctgttgatttgtggtggagagttctgtagatgtctattaggtccacttggtccagagcttagttcaagtcttgaatattcttgttaattttctgtctcgttcatctgtctgatattgacagtggggtgttaaagtctcccactagtattgtgtggaagtctaagtctctttgtaggtctctaggaacttgcattatgaatctgggtgctcttgtattgggtgcatatatatttcaggtagttagctcttcttgttgcattgaaccctttaccaatatgtaatgcccttctttgtctttttctrtcttttttggtttaaagtctgttttatcagagactaggattacaacaccttttttttttctttctgtttgtttggtaaatcttcctccatccctttatttttgagcctgtgtgtgtgtttgcacatgagatgagtctactraatacagcacattgatgggtcttgactctgtctagtttgccagcctgtgccatttaattggggcatttagctcatttacatttaaggttaatattgttatgtatgaatttgatcctgtcattatgatgctagctgtttattttgcccattagttgatgtagtttcttcatagtgtcagcggtctttacaatttaatatgtttttgcagtggctggtatcagtttttcctttccatatttagtgcttcctccaggagctcttgtaaggcaggcctggtggggacgaaatccctcaggatttgcttgtttgtaaaggattttgtttcttcttcaattatgaagcttagtttggctggatatgaaattctgggttgcaaattcttctctttaagaatgttgaatattggcccccactctcttctggcttgtagggtttctgcagagagatcagctgttagtctgatgggcttccctttgtgggtaacccaacctttctctctggctgcccttcacatgttttccttcatttcaaccttgatgaatctcacgattatgtgtcttggggttgctcttctcaaggagtatctttgtgaggttctctgtattttctgaatttgaatgttggcctgtcttgctaggttggggaagttctcctggaaaatatcctgaaaagtgttttccaacttggtttcattcttcccatctctttcaggtacactaatcacatgtaggtttggctttttacatagtcccatatttcttggaagcttttttcattccttttcattctttttttatctaatcttgtcttcatgctttatttcattaagttgatcttcaatctctgatatcctttcttccacttgatcagtttggctattgatactgtggtaagcttcacgatgttctcgtgctgtgttttttcaactccatcaggttatttatgttcttctctaaactggttattctagttagctattccactaaccttttatcaatgttcttagcttccttgcattaggttagaacatacttttttagcttggaggagtttgttattacccaccttctgaagcctatttctgtgaattgatctaactcattttctgtccagttttgttcccttgctggcgaggagttgtgatccttcggagaagaagaggcattctgttttttggaatttccatcctttttgcactggtttttcctcatcttcatggatttatctacctttgttctttgctgttggtgacctttagatggagtttttgtgtggtcatcttttttgttgatgttgatgctattgctttttgtttgttagttttccttctagcagtcagacccctcttctgcaggtttgctggaggtccactccacaccctgtttgcctgggtatcactagcagagcctgcagaacagcaaaaattgctccctgctccttcctctggaagcttcgtccaagaggggcacccaacagatgccagccagaactctcctgtatgaagtgtctgtcaacccctgctgggagtatctcccyatcgggaggcacaggggtcaggggccaacttgaggagggagtctgttccttagcagagcttaagggctgtgctgggaaatctgctgttctcttcagagctggcaggcaggaacatttaagtctgctgaagctgtgcccaaagccacccctccccccaggtgctctgtcccagggagatgggagttttatctgtaagcccctgactggggctgctacctttctttcagagataccctgctcagacaggaagaatctagagaggcagtctggctacagcaactttgtggagctgcggtgggctctgcccagtttgaacttcctggcagctttgtttacactgtgagggaaaaaccacctacttaagcctcagtaatggcggacacccctccccacaccaagctagagcatcccaggtcgacttcaggctgctatactggcagcaagaatttcaagccagtgtatcttagcttgctgggctctgtcagtgtgggattcactgagcaagaccccttggctccctggcttcagcccccttccaggggattgaatggctgtctcactggtgttccaggtgccattgggttatgaaaaaaaaactcctgcagctagctcaatgcctgcccaaacagccacccagttttgtgcttgaaacccagagcccttgtggtataggcacccaagagaatctcctgatctgtggctagtgaagaccgtgggaaaagcatagtatctgggctgggtagcttcgttcctcacggcacagtccctcatgacttcccttgggtagaggagggagttcccgagccccttgtgcttcccaggtggggagacgccccaccctgcttctgcttgccctctgtgggctgcacccactgtctaaccaggtccagtgagatgagctgggtacctcagttggaaatgctgaaatcacctgccttctgtgttgatctcactgggagctgcaggccggagctgtttctatttggccatctttattctcttacaattgaaaaataatgatcttaaaatttttgtctccacaaacaaaagcaagtaaattatctcagtaatatagttttaagaatagttgctcttttttaaytgttggcaggggcataagggataagagaagaaatagttaagaacacaggtgggttcaaatctactctctggcacttactagctggggaactttgggcaactcacctaaaccatttaagcactactagttgcctcttctggaagatggcagttgtaataatacataattgatagtgtcattatgagataaaatgacataatgcaaataaagttattggccatgtgcttggtacaaaataagtactcaaaaagtacttcaaagtaattttttattctaggagccattccttacaggtggaaaaattgtgccttttgcttacattttactttgcatttcacaagatgtcttcaagagtatgacctcattttatcccttccacaaatatgagacatagaaattgttagctacattttctagggaaaaaaaaccgagcgtcaggaatattaagtgactcagccaagggtctacacctcataattagcaggatcaagaccaatgaaagtgcctcttggtaagatcatacctgaagctaacagacacgtgcaggcctcctacaacataggtagccatgtttagtgtaggcagcagttggacttctgtatattcatttctggcactggagactgcttctattatagaagttgtgaccttgtcactcatcaagcagatggcattgcttgattagagtcaggccatatttagaacatttctataaagccattctcatttgggcaaacatttttgccaattgaagtgtttcttttcactaattgagcaaacaaatcatgggctatccactcacaagggctttccaccacccatattttcaggaaggcaggtgttgagcttatattttcagaatatatttccagcttcatacactcttaagagaacattgaagcctctttgatgaaggtgagggtctataaacatgcttgtattcattataaggggattgtgattgtcctcatagaaaaatgactttaagaaatagatgtatcctgaagcaagataatatgagtgtcaggctggacacgtaaaatacaagggaaggtagtggggaaaaggctgagaaaagagtactgtagactttacatcacaatgcttaaattaatctaaaatgtaagctataaaatagactaaaattatatatagacgtatgtgcgtatgtgtgcatatgcataaaagtgtatgtatctccatacttcaaaggctaatattcacagatagattcaacaatcaaatacggagttagttttgaaggaaaagccaaataagacacctttgctagactttaaaattttattttaactgaaactacggtatagacataaccatataaactaatctatttacttgtaaaattaattgtttcattgtcattgaatcagatgtgagtgtatttagataagtcaaggtagtaaaagagtataataagaaacactgagacccagggatcatgctaactcagacttctgtcttgagtctgccacataagagcaatatttcctcaggcaaattattttcatagttttgaacttgaaattctcatctgataaatggacacaccaatgcctaacacatagggtagctgtgaggattaaatgacatgcgcaatttgcatggcttcctcatcaagttgccacttgtattagtcggctagggctgctatagaaaataccacaagcttggtgccttaagcaacagaaatttattatctcaccgttctggaggctaggagtctgagatcaaggtgttggcagggttggttctttccgagggctgtgaggaaggatctgtttcaggtccttttcttagcttgtagatggccttctctctgtattttctcttcgtcttctctctgtacatgtctctgtgtccacatttcccttcatgtctctgtgtccaaatttctctttgtcttctctctgtacatgtctctgtgtccaaatttcccttttattacaaggacaccagtcacattgaagtagggtgcatcttactcctatatgacctcatcttaactaataacatctgcaaaaaccctatttccaatagggtcccattctagggtactgagaggttaggcttcaacattaattttgatagggggacacagtacaacccataacaacactcagaagtcactttctcagacagaccatgcttgaccactgatgtagtttggctgtgtccccaccaaaatatcctgaattgtagttcccataatccgcacgtgtagtgggagggaccaagtgggaggtaattgaatcatggtggcagttacactcatgctgttctcrtgatagtgagtgagttctcatgagatctgatggttttttaaggggctttcccttttttgtttggcacttctccttgctgctgctatgtgaagaaggacatgttagcttccccttccaccatggttgtaagtttcctgaggcttccccagccatgctgaactgtgagtcaattaaacctctttccattataaatcacccagtgtcaggtatgtctttattagtgggatgagaacggactaatacaactaccttttctaagaacagtcttaccctttcctagcacacacagtcccttgccctatataatatgccaaagtaaatcatagaatcatttattttcttattctttttctatcccccacactagtctgaagtccatggtgccagggccctacttgtcttggaggttgttctattctgggcttggagaacagtgcctggtacaaaatagatccttaacctctggcttgaggttagggctcaataagtaataggtggtataagtatctaaaaaagaatctcattctctatccaaattggtattcactagccatatgtgaaagaaactaaattttcaattttattttaataaatctaaatttaaatatccattagtggctattatattggacagcacagatatagaacatttctgctactgcaggaagttctatgggacatttctagacatagaagcatagatgaggatataatagtgataattcagttcagacccggtgctgcctgccaaattccacaacactgccctgcattgctgccctctcatgacaccacacagctcccagttgatttgttcttctttatggtaccaggtgtattgggtgtattgcaagcattttcttcttccattattaagttaaaaataccccttgaagttttgaaaagctgtaaaggggttgtcttgagagtcccattaacatttatagtgaattctgtggcagcaattttttattttaattgttgttgtctttgctattcagataagtaagcagtaggcatrgataattaatgtacagattctgttttacacaactttaagaatgactctttgagaaacatgtctttaaggacaatgaactgagatatcccttacttgaggataaaatatgggtgcaggtacaaggagtcagcaggtgtcacgtgtgggctcatttcttccctcaaccctggaaagtatatagattctcaccatccttgttcagcctctgccttagggataagcagtgctggggtgattttatgctcagraagtaaccaaaggctagcaaacatctctcattgttggcagtaaaaaccattgctatgaataacaatctatattttataaaactattttggcttcacataaaaatctgatgcttcaaggaacatactccaatgtgccttgaagtatagcacatactccaatgtgttactgaatcctgaaccacacccctaaaggaggcattcattgatatcactggcttaacaaaaggctttggggtggggtgaagggataatacataatgcagttagaaagtgatagaaagcatattgcttatataaaattcagtgctaggtaagaataaaatatgaaatacatgtggcaatgaacttagaatatgctccagttttggaaaaagaatagtaagataaaaccctagaatttggaacatttttaaataacctctattactatcattttaatctttgaacagtgacaaaatatcccacctgctttgtgacttttctgaaaagaatacatggtcacagggtattctctattggaataccattcacaccttcaaacttatcaccatccagttaaatttgaggaatggtaattgatgaccttaagtgagtcaagtcacaattacctgaagaactaaaaatgctactggaaggactagactctaagttggtacctaactaattcttattgcctgaatgtggttgtagagtagacccttcattaggaagtgaataggggaagtatgaaaaattaaatgtgtacaaaatccaaagcttcctgataggtcttttgggctattttgaagaataagacaaacaacagaagcattataattggaggattatagagccaacaaaggcaaagtaggagcatatttatcagacataataaagacagaaattaaagatcttatttatgtttgaggcataggaagcaatagaagcatatatatttgcaaggtctagacatgcctctattcatcaatgcattttagtattttagctcagcgttcattaaagttattaccttaatttatttaatcaaaatattgactctattctcatactgcaaataacttgttacatgatttggatgttaatatgatttttttaccactgaaagttaaactaatgctcatcctttcactattaaaatattaatgtcttctattttagtttagcatttaaaaaacaaatttgtagagatgggatctcactgttataaaaaagctttccatttttgtaaactgcaaacttgcagttagcttaactaaaattacataatagaatttccaaattaagaaattaagtcactcatttgttctgtaaagcagtcacccttgaataaagaaatscatggttcaacatattttttaagaattcaatagtactttcagctttattgggatataactgacaaattgaaattgtatatattttcagtgaacaacttgatgttttgatatacacataaactttatgaaatgaccattaccatggttccatataaccattgtgtttaaaccatctaattctcttgttgactttcatttaaatgtttgatgtatagaaacctcatttcattaaatacttcagaggccaactgttattttatagaatccaacaaacattactttaatgttaacggaccctaaaatggaaaccaggcattggttttttttattttgttttgttttgtttttttgagacggagtctcactctttcacccaggctggagtacagtggcacaatctgggctcactgcaagctccgcctcctgggttcatgccattctcctgcctcagccacccaagtagctgggactacaggcgcccgccaccacgcctggccaattttttgtatttttgtttttttagtagagacggggtttcaccgtgttagctaggatggtctcaatctcctgatcttgtgatccrcccgcctcagcctcccaaagtgctgggattacaggcatgagccaccgcgcccagtcattggtttgtaatgccataaagaatccatgaataatatagtcgtgtatttatttttgaaagagaatgttcttttaataaagcatatgttttctaatttacacttgagcaaacctttattttaaagaaaaattgagaaatttatgtttcagagttatgagacaccgtcttcttatctaagatatgaaggatgcagcaataaattatccagatgttttggctatagtctttttttattgttgagtaacaaatttccatacacttagcaacttaaaacaatatccttttttttttttaatgtcgcagctctttaggtcagaaattcaggataacagggctggtttatgtgctcagagtctcaaactcaaggctgaaattaaggtgctaaccagctgtgatcttatctggaatcaaggtcatctctcaagatcattactgccactgttggaagaattcagtttcttgcaattataggatagaaatccctcttcttttgctagctgttggctgtagccccctgtgaccttctagaggccactcttggattcttatcccattggtcatcttcatctcagccgtggaagacctcccctctcacacttcatctctctgacttccttttttgcttctagctaaagaaagcactctgcttttataggttttataggactcatgtgattagattagacccaccctgataatcttatcttaaggtcagctgattagtaaccttaattgcatctacaaaaattcctttttccatgtaaagtaatataaccgtggagtaacaccagggctgagggtaataggagtcatcttagaattgtgtattagccaagatgtggaattcctatcaataaatttaagcagtgtttccattatatttgaaaaggagagaagattagggtggctgatcatcttgtatttaaatgctaagaaagacaataatcacagccaaraagcttggtcacatgttgactttttaggaactcaattatagcaatcagaattgatagaggcagaaatcatactgcaaaggcttaaaggaatgctaagagttctaccatttgagaaataaagaactaccaggcaaaatgaagaaataaccatgtaattgaaaaactgccagaaataattcttaattagatgtagaccaaatgtctcaatagttggataacaaggcagaggccacataattcctctgtgcatcagtctgctcagacattctcatccattgcagattaaagccgagtactaccacgtttgtgccacagcgtctctgtggcctcctccctgatggctgcctgggaacatgttcctcactgcatcacactgcccttcccagtctctcaggaagcttaaaggggtaaagcaaagggaggagactgaaaaaaaaatgacaaattcgggagaagatcttttaactttctgttcattaagtgagaatttgtagatagagtggaaagaaccattgtgatcaggggcaggagtatgtgaaggaaaggagggatagactgaagatgtcagagacagagaaggccccaaaggatggaacaggggatggaattaggagaaacgtcctgaaggatagaatggggatagaattaagagcgtgcatggatccatttagtctggaaagtgaaaatcttatttttctgaaatacaggaaaagaacagaaaatgagtagtggtttcaaatgagggagaaaaagcaattacatgtaagaaggcttctatcctctcaacacaacggggctgctttatatatattttctcttctgtaaagtgataaaaaatagtaaggccaaataatatttatgatagttaactgatatgatgcatataaactgcttagagtagcatataccacattataaatgcacagaaatgttagctattttttactatcattgccattattattttctattgacagtaaaggaaagtgaggtaatgttgtgaatttaaaagtaacataaagcttttcaatcacttgttaaaaatagcattgcagagaaacattgaaccctccttaaatgtaaatagcacgattcatygaacatctagtcaagatgactaatctttttttctagtaacgctcaacagtctagaaggtacagaaggcggtgggtatcaaggtttataaaaggtcaggaattggaactctggggacctggttgttctcatgagggcacataccaagatcagggtgagctaggaagtttaagtgataggaagataatagatttatttagagaggggaaattgagacagtttcaagcctcggagatggaacagaacaacagagctccaagcactgggatgcagggctggaggtgaccaagtccacgactttgtctttctaaagtgaagtggaggtgagtctgaagaaattatcactgtgattaaggttgttattgagggcaacagggcaagctagcttaggaagaaaaagtttggcctaggtrtaagatgtagttgtctaatattgaacagcacagattttagaacattagcatcaccacagaaaattcgattgaacagcactgtactagaggtacaggaaagtgagagggtagggtcttacagaaaatgttggagcagaagaaactatgccaaatgaggatgtgagcaaggatattctgtatttttgacaattttgaagcattatttattattttaacgtttctgaaatttggatgagtcatgcaattgatgtgctcatttaataaggttagtgtttatttttgtcctgaaaaaccattaagcaattaataatgcatctcacaatcagtgtcatcataatatcaatgaaatatggtaagagcaaggccaaaggaagggttttcttactgggtggtgatcacaacgataaagaatcaggacaaaaagactgaagagatgtggtgataatgggatatgagctgagttggaaaagaactagccccaagatattagtcagcactttggaggggtgatgaatttgccatggtttaaagtacttctttgagtttacagcacccgactctgtgttctcagaccttatgttgtttgagaattgggctgatggtgagtgtcaggagaatgatgtcagtcattctaaaatagtctcccaggtgctgatgcgctttggcaactacagtaggtcttccttaagattgggcatggaagagacaaatgtcggagaaaaatacccctcttgttttgagtggagaaaatcagaagaaagggagagagatcggggtgtgccgaaagcaaagccaatgtgatcatcaagataataatagccatacattaaggtagtcaagatcatagacttgagatctgaacttggatggagatgatgaactacacagttttagtctcatcaaaaagtcagctacatcagatggaactgaagttgtttgttttgttttactttttgatgctgtaataactctggcatgacttttcacagcaaattagaattaagaccttttaaatttgtcccaaatggttattgatacctgcaataatacttttccccctggaattatattttcctcttaaaatatatgtgtgtatgcatacattcgtatatatagtgtgtgggtatgtgtttgtgtgcatatgtgtgtgcatatatatatataaagaaaatagtgtagcggaaagaactctgttttctaagtcaaaatatctgattttgaacttggggtccagtgagccacttaatttcaggtttaacttctggcaagttttatcttctgaagccagaagtcattttcttttaaaaagaggcaatacttgtaactcttttaaagatcagatgacataaaagatatgaaaatataaactataacgtataaatatactgaactgtaaagtcatacaaatttaagtcattaatgttactgattggagttcatttctcagatttcacatagttgttgggcacagaaaatttggaaactttggctttcattcttgcacagactaatttagcatcatattcttgttctttgctgatttatcaggtaaggaaaaagtcaagtaaaatgatttggatgcctcactgccagggaatgcttgataaattaaaagcctggcttcctagggacattctgactactgttgtttataaccaagatcttttgcaaccttagacttcccaggaaaagcctgggctttgttgctgcaggaaggagaacagggaggaaaatatctttcagatttaatcagtgagaaactactaggaattagccactatgctagggaatacccaatcattattttgatacttttgtaagctgaagcatcatttaggggcctagcaggtttgctttctgatcatattcaaagccttcacctgggtgaactcctgtgagaacctataattcagggatgctaaagtcaccatggtgacaagaagaactcagctggcttcctattcaatgcatctcagatgaaggtgctcactccaggaaacataaaggatatccattaatttttagctttttttgtgtgaagcaaagggtattgctaatatacaacctctggaatagacctgatcagttacccagtctctggaagagggtggtaattgaaaaactaataagggcaggccctagtctaagaaactaaatctaagacagccacctgaagtgtgaagatggaaattgcagagttgagtctggagtgttttataggcttatagctctaacttgcctaattgaacttttacaattgaacttttacaaagaaagtggggatttatttatactcctactctagggggccacaaaaaaaaaagaggaaatgagagtataggagatttctctaggttatcataagaaagaagtctgacaatacaatccttgttccatttatctttttataataaaccacaaaatatttaagagctgttggaattctttgtttcttccccatgctggctattttgccattctcttcatctcaatactttgctgagtaaaagtcttgaaaccaaaaatatccctacaattcatgaccttgagtgacttcaaaattcagttagacaaaacagacagctgagttctgtggttctcaatctttgtacttttaaaagtattcatgctttggttctacccacaaagatcctgatttcactggggctgaagtgttgaaagattttatagccaccaaatcaccctaatgtgcaatcaagggtgagaaccttattttctcatatcccccttccttatatccactgatcttgacttcagttttaccttggcaattcacctccatggccacactctgaactttgtcatcagccagaactgctccaaccaacctcaaaatcttaaactcaaatatcccacactctaagcatagttttctttctttctagctcctcttattacgttaaagacctaatagtcttatttctcaactgctttcttgctaacccttcattgttctcctcataaacccaaacaggagataacaagccaggattaatccacctgtgtgatctccccatttttaacccttgtgtttccagagaaaaacacaaccacttacactggtgccacagcaagttcatactctccagacccaattggatggagcctcaatactgccaaaatcccattcatttctctagtcagccttgtgtccttttttcccaataaaaactctgtctcttggtcacatggacatttccatcctatttctgtttgaggtagaaatctgctcctgtaccttgagtcccacctgcttctgccttttcagttgacttgctccttcacctgccacttgtcttggatcaccagctttagccatggactaagtctttaacatgggyatttaaacatacttaaaacacttccttcaaaaagcaaagcataacagtgctaaagcaaattttcatgggtcctcctctgcctactgccttcctccctctaacagccaaataattttgcatctactctcaattttgcactttcctacaccaaatatactgacatttttagtgctaaatccaggaaattttttcttagtctttgttttactcagattctcttcagtatttgaagagtgtaggccactctctgtgcataaaacagtctattcctccatgggctcctagctaacagcctgcagtttgtcagttttctttggggtttcttgatcctctgcctaccactgaaatggcagtgttctttygtcagcactttctgctgttaccccatattccagaggtatttagccatggctatgcatcagaatcacctgcaaagccttttaaaatgcagccatccgcttgctatgctcgatcatctgaatcagaattactagggattggggcccaggcacctaagttattcagaaattccacagatgattgtgatatgctggtggtcttcttcacatccatgccttctcaggcattccctttatcagtctttcatctggatatcctagaccctaggcttatattttagatatgtctgcacaagatgtccaaactcactgatgtgtccaagagagcctccttgcctccattcccttcccatctcatccaatctgctctaccacctcccccttttctcctcccccatatttcagtctgaatgagtgacatcagattttattaaattgtacaagccagaaacttgataatcattttgaattgttttatttatccctcatgtccaatcaattgtcaagttatatcagtttcacctctagtattctccaaagttttttatatacatgggtattactttaggttaagctaagtcagtctgtgttgctataacaaaatacctaaaactgggtaatttataatgaacagaaactcatttcttacagtctggaagctggaaagtccaatatcaacgtgccagcatcttgcgagggctttcttgttgtgacatcatatggcggaaagtgagagggcaggagagagcaagaagggactgaacttgcccttataagggcaccaatgcctcccatgagggtggagccctcatgacctaattacctcttaaaggtcccacctcttaatactgttacaatgactattaaatttcaatatgagttttggaaggggagaaacattcaaaccatagcagccaccatcatctgtcttctgaaatattaccaccacctcctgactgtatcctctgtgtttggctttgcttactcccactaatctgtttttcacacaatgctcagaacatttttttctagaggataaatatgataatatatatttcctgcttaagacttttcagtgactatctgttgctttcagaatagaggccaagctgtaacatggcatatatggcccatcagaacccgacgcctgttctgttcttttgtcaggtcctctctttcattctgcacacagttttcatcacaattctctggcgttcatgattctctcttgtctctgagcctttgtttctttgctgtttttgcctagaacaccctcttcctcttggctcaggtcttacatcttccattcctgtcaaggtaactcctcctcatgttccagctcatatctgatatatcatcttttaaaaggatgtctgcctaaacctgtagaatgggcttaagagggcttcctgtttattctcatactgtgtacaatgaaaatctactcattgatttacttctctctcccacccaactttatgttcctttaacatagaaacttttaggcatcgaagaattcttttttttacatgacacataaactctcaatgattgttgaaggaatgaaatgaggagtattcagaactgttagtaaaaaaaaaaatcrgaaaataatgatcaagagaggctttataaagggaaagtcagtagttgaaaagctagaagtagaatgagctgactgacttgaaaagaggccactacttagtgaaaagcacttcattggtatggtaggagttgaagtcagaatgcagaaaattgaggaatgagtggtgtatgagttttctgctgaaacaaagtactagaaacagagtggtttaaacagaaatgtgttgtctcacagttatggaggtgagaattctacgatcgaggtgttggcagggccatgctccctgtaaaggagctagggaaggaactgttccagttctctcttgtagcttctggtagttcctttgcttgtagcagcatccatccagtcttcacatagtgttccttctgtgtacgtgtttgtctcttcacatggtgttctttttataaaggcgtgaggcacactggattagggacctactctcttgcaatatgtcctcatcttcacttaatgaatcatacctgcaacaatcctatttccagtaaggtcacattctcacgtacgaggagttaggacttcaacacatgatttctgggggagacgcaataaagtgttggacttgggtttattcgtggtgctattattgtcatacattcatagatcaatattagcttttaatctcttattttagagtccacattgtagcataatatttactgtggttgccatggaagagaagttagtaaatgactttcactatacagggctaccacactggtttccaaattgagctcttcaaggttgaagatggaggacgatggagctcctccaccacagcaccctctctttgcctaatttacccataagcaaagcaaggtttgaaatccacctatctaaaataagacttttagacatgttggaggatatatttttagtcataatgttgatagcaaataagaagagaagatacaccctcagcaattggagacaagaaaatctgatgcataatttaaaagaagaaaacgacaaaaagtacgaaatcttatgtgcacttattacctaatactttaaaatcttggagatatatatatatatatatatatatatatgtaattattaggtctaagtaatacacaaagttaaacccttcactatcttagttggaatacgtatagaggtatagatatatatagatatcctttcccacacttattttagctcttgaaatgcatagaataggaaaaaaatcagaattataatctccatgggagcaactttataccaaaaaacacagaagcaattatatttgaaacctgctagagtacaaaattctagattatctttagcagtttacttttattttcatggataaaatttgaaaagacaagggccagtgactcattctaccatttgagagcatcgctagggagcatgacattatcacagagacagatatatggtgacttggaaattttttgtaggtaattcctattcttaaacttaatatgagttgccaatttggaacactgctacattatatttatcacagagttataacttttaatggtttgagggatcatagatctgaccacatcaatatttggctcattttcaaaatagaaagtgctgaaacaccaaaatactgagctgaattctttaaaactttaaagctgaaaaaccactcatgtacataaagtgaaataagaatcaacctagtgtaaatggctgcatttttgaaattccattgtaaatcttaataaaaaatattgttttaaaaagccagcatgtttggaaatgggtgtaatttgcattaaaatcagatgagattatttcttggttttactactaagacacatggacacaggaaggggaacatcacacaccagggcctgttgtggggtgggggaaggggggagggatagcattaggagatatacctagtgttaaatgacgagttaatgggtgcagcacaccaacatggcacatgtatacatatgtaactaacctgcacattgtgcacatgtaccctaaaacttaaagtataattgaaaaaaaaaaagacagattgtggatgcttatggaaaatacgtttactttttctagactcctagaaggccattttgaggacttctgtaataattcactaaatagatagaaaactgcctagacctatacttcgctgtaagatagtcctcttttggtctaaccctcatttctatttagctaactagctagtcaggagtgtaaggtaggcagtataaagaattttaaacttactagggtcacattcaaagtaagcctagagtaaaatcaggagatcagattaccccagctactgagactgaaatgtgaactgtattgttgaagagcttttcttcctcacaattgaagaagacataaagactggtgatataagagcaaatgcagacacttttggtcactgttagcttgttttgaatgtgctgactgtgtctgtgtccatcttgaaaatattgaggagtcagcaaaacatatttgactctttacccactttttcttaaatgtttcatagtcatgagtatttcgtgggggaatttaatctatgtgcctatgattcatttacactagtctcatcaaaatggcatagggagatattgaatggctaagaatccttaaagtttaagaggccatttaaggcttttatctctgaaccagaaagtcatagtgtaccaggactactcccaattcaaacataccagggttcaattttgttttgtctaatatatcccaggaaaccttactgtttgattcatgatttctaacctcaaaatgctggtctaacatatgtatatatatattaatgaagtccaggtaagaagcgcatggctagaatgggaatgttcaacataaaaatatcccagccaggcgtggtggctcatgcctgtaatcccagcagtttgggaggtcgaggcctgcagatcgcttgagctcaagagtttgagaccagcctgagcaacatggcaaaaccctgtctctacaaaaaatacaaaaattagctgggtgtggtagtgcgtgcctgtagtctcagctactcaggaggctgaggcctgagaattgcttgagcctgagaggtggaggttgcagaaccgagactgtgccactgcactcaggtctagatgatagagagagaccctaccaccaaaaaaaaaaaaaaatgaaagccacattttgaataactaaatttgaatatcagcacagttgcctgaggatgtatcaatttacagataaatgccttcctaccaactgaagaataactagtgctttaaaacttttcatccattaaaggaaagtcacactgaattactccgttggtgttgtgcgatattctatagtttttaaaatgctttaaaatacataatcttgtctgattaggtaaacaggattggtattctctccatttctaaaaggggaaaatacaattacatagaagtttgtatattgttgctttatgtgtagtaacatagactcttacagttctgagctatgattgtatgcaataatagaagcaatgctgcacatatctcatatagctctattttatttttaaattcacttttctcatacttgtaagaaatctttgactttggttttagttaaaagataaaacaaaatcataatttctatgataatacaaagcttgaatattatcattggcataaaattcagttctaatttttctccaaaataagatgcttactccaatataattatcttccttcttaattttacatatttgcattttaaagtggcctattcctatggggctaatgtcagagcagagtgttctttgaactcaatgtgtgctccccagtcaggtcaagtccagtcagggcagtgactaagaaatgggtcagaacttacttaaattatgcagttgcctggaaaaaagttcaacttatataatatatgggaatatgtgaatggagaatggcttcccccttaatgtgtaaactgtaactcaaaatatttttttgagttatagaaaaatttttttgtaaaaaaattaagaaaaaagttttttttaaaaattgagccaaatattaagataatcttcatggtgaagcattactaaattaatttaacggcagtcttaatgtaatgtaattttggtttactgatatgtaatcagttaatcttgaagatttcataagttctggcatttgttctttcctcttgtttctctcttataaattggtcaattctccaaaatatgcaaattaaatttaatgttaacctatgtgtaagtcaaggcatgtgaatcccatgaccaaataaatattacaaagcaggtgtctctacactgatgctgaatacctaccatttagagaagacaactctcttccccagggtctcaaggcatctcattcccctggctttcccccttttcccttgaggactctgcatcctcctttgctgcatcctcctcagctttccaaagtcttagcatggacatgtcccaagcttagtccttgcagtcttctgtcctccttctgcgtatctcttacacctcatctaatcacaagacttcaaagtctatatgccattgtttgtcaagtctctaccgatctggatctctcacctgatacagactttcatattcaactgccttcctgtcatttccaccatgatgtctcctctatacctgaaactgagcatgtccaaaaccaaagtattgctctttcccagcaaacttgctcctcctggagccttcctgatctcagaccaaactttgttgttgtctttgactctttttttcctcacactcccaattccaatccaatcagcaaatccagccagcattctttcaaaatataacccagaatttgcccatttctcaccatcaccatggcaaccagcttggttccggccaccaactttcccacctgtgttgctgcaccacctcctgaccagtgtccctgcttcagcctgttttgcacccctcagcagagtgaggctgctccagtctaggtggcattaggtcacttctttgctcagaatacttcagtaacttctgattttcctcaaaatgaaattgaaggtctttataataatctactattttttcctgtggcctctcagattcagctcctactcctcctcctctggtccagtcactctggtctccttccattcccacaactatccaagcaaagtcctgcttcaggtacttcatgttctcaagtccttcagccagaacttgcatcagcctgatatgccattgttttctttcctcacctctttccatcctttatttggatatcttcagagtgaggctatccttttattttgtttttaataattatatcttcaccatgcctgttcctggcattccccatcccctcttctttttaaattgttctccctgcaaactgttatcatataatccttatatagatttcactttttctttttgtttatttttcatctctcctaccacgactcaagagccctagttatttcatagttcactgctatatccctggcctttagagttgttcttagcatatggtggcagtcaataaaaatttgttgaatagataaataattactgtctatcttcctctccttaggtagaagcaggctatataaaatataaattattggattgtcagacttgcccatatttatattcaaatacgataatccaacttggttgttggaatctgtaaaaaaaaaaattagaacatccatttttaaaagattgaacaagcagtaatttttttccaaatctaaaacaaacaaacaaacaaaaaaaaaaacagtgtcaatcaaggaatcagaatatatattgaattaattgtttttaggtcattagtgaacttgactgtgctgttgctctcaaagcactaaaaatagctgatatcaaaccaaaggtccttcatgatccttgaaacttccttgcagttctaaagaaaaactcaagcttataggaagaagttttaatgagacattgtgctgttcaggagagacaaaatcatagtttctgacctcaggggcattgataaaataagagagcagaagctctagggaaattagtttttaggaagtggaatccggtggctcattgcacattctaaatagcatcagagtaagaatgacagtctggctgattggctttagtgatgtggatagatttggctgctatattatcaaaactggattgaaatccctcaatatcaatgaagttttacaaaggtataaggactactgggccacagttcattctaggacttcatttaagtgacaaagtaaggtgggccaaagtgagattgggacaataagctaagtaatcttaaatttgttcttgtgtctatcctgatttgatcaatccacaaatattaatatttatggaacatttactgtgtaccaggcactgtgctagggagattgtgtaacagtgaccacagcagatgtaaaccctgcccttaagaagtttgtatcctagtgtggagacgggcattcagacagataaatgaatatacaagtgcaggttgtgatgagtgttacaaggggaaatacaagggtgctaggggagagaacatgagccatatgggttaaaccagggctatcatctgactgcttgtgtcctcccaaaattcttgttttgaaatcctcacccccaatatcatggtattaggaagtggggctttgggaggtcattaagtcatgagggcagggttcttacaaatgggattagtgcccttatgaaagaagcctagatccttttccccttgagccttgtgagcttgcagtgaatagatagttgtccatcaacaaggaagtaaaccatcaccagatatccaatctgctgatgccttcatcttggacttcttagcttctaggactgtcagcaataaatttctgctatttctaatctactcaggtattttgttatagcagcctgaatggactaagacaaccaggttgtcattaaaatctaccctgaaggttcagtacgaatccatgatgtatttgaataagatttgtatgtgaatcctctgtaaggacatccagatttgtggtctagatcccatttcttcccactttctaagagaccttgtacccctagcccctgtttctttctgccagcattttctgtttttctccactgactccttaccttctgccattatcaagttttacctattttgaaatataaatatcacatttaattattctccatagccttacagacttcatgtcttcaccactcaaaacctcatgtagtctccttttccccctcgtttacttattgtttcattgaggtgtatttcaatgggtttgaggcatgatcccatccaaaggactaatgtgcatatactcaaaatgttaattcagctgaactgctcacatctttgcttcattgcccatgtctttttgcactgaattgtaagccactaagctttgaatcaatgaacattttaaaatgttatttgtatagtgtctaaaaacatgtggcagttgagaatagattaatctgttctagaccaaaataagatcctggtgaagaggattttaaattcttgagttgaaagctgatcaaggtggaaccatataatgccacatgatacagtgtgatgtcagatagattattgtaacaaacacataattaattagtaatgaagtaatagggttttagatgtttaatcttcaagctggtagatataaattaggtcacattaaaatcagttctccagtctcaatagctctatgctcatattctccagcataaacctcagtaactcacacaacctctttcacttagcatctctgagactctggggggtgccttgcaattgcccctgcatggatctgcccaggatgtcactttgtactggtctctgctctaccagtgaccttgacccatgttcattagtctcttgattgcctaacggcagacaccaaccagtttgttccagctatgaatgttctctgttgtatctagggcagtaccagaacactattcacctgcagagtagaaaggagagtacatctcccttcttgctctctcaggggaagccaacagctgtgctgcttctggagctctcaaattctaggaatctagtgaaaaaagttctttcagttctccacacaactctttgtatttccgggatatgattaggagagttcatatgccagtcaccacaatctgccaagaaccactacacctttcaggaagctcagagtttgtggctgaggttcgggttattcataccagattccttttttctgtagagtgaattcttagtcagagacccattttctgttttagtgagaatgggctacaggaacaacaccaaaagctcagttgcttagaagagtagaggcttatttctcactcaagctacatgttcatgacaggtttgtggtggagggagagggttctgctcttcacttaggaacacagttaatgggagacaccacagtcgggaaagttcccagtcattgtggcagaagacagggcacttcatacacagacctcagtggtttcccccagaagtgacacgtattgcttctgctcacatatcttttttcttttttgtcttgtttcatcaaatcatagtgatattcagattaactacatatatatatgtgtgtgtgtgtgtgtgtgtgtacatatacaaattagagagatatacgtgtttctcatgctgctcacattttatttgccaaagtaaggttaccatgcctaacttcaaaggggcaagaaagtgcaatcttgccatgtgccttaaagagggagaactgagaatggtgacgaatagcaccaatgatgagtacaccttcttccttgaagttttgcatctatatccttctacttcccatccaatcctgccttttatgacatatctctctacatatgatcttcaatcatgtaaattgctcagtatttctctatattaattagtggttctggctaagggtctctcacgagttgttggcttgggctacagtcatctcaaggctcagctgcttcctcagtgactcatatagttgttggaaagcctcaactccttgccatgtgggcctctctatagggctaaccacagtattatagcttgtatcccccagagtgagagatgagagagacagataggcagacagagacggagacaaaagacagagacatcccaagacagaagtcaaacacagtctttcataatctcttcttgaaagtgacatgtcatcactgctgtctgataaccaatcctgggatagagtgggagggggactctacaaagatgtatgttaaatgccaggaggtgggagacttcatggaagctggctgccactctcattcaagaaggctacttactcttatgtaaatcttggctgccaaaaattgctgtctaaatcatagcttcttccaagtagcatacccaggacagggtaaatgcaatttaaaacttctctcaagggggttacttcatttagactagtgttggtgttctcctatgcaattaaatggttcttgtgtcttatcattttcaatgtccaatatccaaggaaatacatgcactcatccacagaatattttctttatttttaaagttttaatgctgtttttaagtcccttgtgtttaggtggttgttatacttgaaatgttagcagacataatacacagcaaataaattcttgatggttttgcttatcctcttctctagaagcatgcgctgtgtgagctaagtgtgactttaaataggacatagggaggaattagaaatagaggcaaagtggcagaaaccccacattaaaatccatccttgtcagcactctctgatttcacataccagggttcttttcggattaatcaaaaaattgttgaaacgtgttaaaggagaaatgcaattctgtaaggggaacacagttcctatttggagggaaggaatatgtatggccactataataacaaattaggggaaggcatgtgtgaatttttatgcactcatcgtcctattgagcacaagtagagaggtttattttcttttcttcattaattgttcttacagaaataaaccacactgtgtaggaaactaggcactcttccctacctactcctgctattgaaagagccttatctatggaaatcctcaaatcagcttcttcttattgtaccagtgatgtctcttggattaattcagacaaactgtgcagtgtaaccaatgcagacagtatgttagaagcgcatggatagcttgcttccttttcattccttcttccttcctttattgtttccgcattgtggttccttgtatcctaccatcttgaatctcttgtacctctaattatagtatgctcactatatgcaaggtttctcctcccacctaccccctgctgcctcctctactgacatctcacttcattcccaagaaaaacattgccctcccctccaagctcactgtgtttgcatttctctgctcttttccgctctcctccttggcatgctggtttaatcaattttaccaaatgactttcctggcagctgtaaaaagaaaaccccagagcaagttaatagcaatctaatactgcactttctgtcatttctctaaaacgtacagaactatttggtcattggattgatttttaatgatctaaatgatcagatgtttcaacgctgcactgcagcagcctgataataaataggaaaggggaggggcatggatgctgggcactcagtcagtgctagatgaataatcctaaaacagcagccaaggagacaagataaaatgtcagcctttgccaaatcatatattagcatttttaaacaaagacacctctttattttgattttgcatatggggaactaaaacaaaatgtttttgatgagggtttaggaagtcatcaatagggttaggaatcaaattacagcctaattctacgcgtatctgttgacataagcagaacgtcagtaaagtgcctcccaatatctctaaatagcctcttggcatctgaaacgtagggaaaaatattggttactttttaaccaaaaggcactaaaacttccaaaggtatatgaaatcagtaaattataaaacatgtccccttcccccccttctgtaagaaagaaatagaaaacaaaaagagagatgaatatggggaaaataaacaatgaaataatattatgaattaattgtaagacttgctaactggctgtgtaactttgggtgatttgcttaactattctgtgctttgttttcctcactgtaaagtggacaaactagtagtacttttgtggaagattaaatgaggaaaggcaagtcaagtattgagcacagtgcctggcatttactacttacgaaggttatgttctttattactccatctactctttccataattgcatcccctccaaccagtcctgtccagccttctccgaatccacaggacaattctggtctcccagtatggtgggcaaaggtaggttttggtgtccaagcacagctcagccatttactctccaggtccatgggcaagtaacttaacctctccaggttcctcagattcatcatctataaactggggaatattagtacatgctttataaggttattgtattaaaggaaataacttgtctaagtctcaatgcacaaagtcttccccagaagacagacttgaaaaaatattaactttatttcactctcctcctgctgccatttccaatgtgctgttgcatgtttctaaatggtatgtggaagaaagctgattagtttctttgctaattattaattgaattcctttagttaatacaatgtattcttttgagaagctcagctcaatttatagtgctagaaacatacaaatacagaatttatacgagttgatctggggttcacatagatgaaagggtgttttcctagcacattgctctgagaatactgtaacactcttacttcatgtatattcatgtatatacatatgtatatatctatatatgtctgcatctacatatgaatatatgtatatcaactgttcttatttagtatagttctccctgaaaaagaaggtactattttatttttaaatattggatcttatttttaatattggatctatctgtaataaagtagccaagttaggctgactacctgtctaatgagtttcccgtttagatggattagttccatttagtctgttccatagcccagatcagacagttcactaacaaatacacttaaattcacatcactttggtccagagggtgtaactaaggcccaaacctgcttctggtgaaagtgacccagaggtacgctttgctgataatatcaggagcatggtctttgtaattggaagacactgtctcccatctccccatttgttattgcaagaaaattagattctcattgaaataacaggcccaagaattatagtaacaggagtttgaacccctgtttgagaatgttggtactcctgggataaatgagatcaattttagcctataataacggtgctttctacactttttagatgttagagaaagtctggcagcaaagcaaagctttgtatataccatgggaggcagggttggagaataaaagaagaaagagagacttaagaacaaaattgtgtttgatgggatgttttgattttctttaaatactttaagtctctagaaataacaaatttattatctgaaatacaaataagaaatacttatatttggaaagttgataaaactcaattattgtgtaaaatgttcacaaatttccaatggatagaaaaaaataaacttttgcattgccaattattgaatacttattttcacctttggaaatagcaagtcagttacaaattttataaatctatataattgtctttatacataataaaaatattctgatgttttgtcagccaatatgcagttttaagcaccttcaaccctgttacatgtttacgggtttggaagttactggggaggaggtagaaaggtctgaccttctccccaggaatttaatatctggtcagagagaaagaaacagacttttgttgttgttttgttggtcttataaacagtgccaaaatgaatgtgtgtatgtgtgtgtatgtttgtgtgcacttgagcaatcatttttgtaggataaactcttacaaatgtaattgttctgaaatggtatgtatggtttacatttttaaaaatttgctaaattgtactccaaaatgtctctcctaatccatgtttctaacaactgtgtatgggtgtactgtttcccaccccctcacaatctgcatatttttagtcttttaaaaaaaatcttaaacgaatgtgataggcaaaatacctcattgtagtttgatttatttttggttatcagtgagattgaagatcttttcaaatggcttttgactatttatagttccccttctgtgatggttatttgcatccatgtcccatttttcttctgggttattggtcttactctaatttatagactctccttaaggcaaatgataccaaaaccataccatggctgtttacagtcgaccctcccagcttacgttgcattaataattgcttcttagaagcttatgttattcatccttctcctatttctacactgctgttttcttgcttccctaatttaacattctcaccattgcagtcagcaggttaaatggcaaacatctgaggaatcaagggaaacaactatgcattgagtacttgcatgtgctacatgatttaatctataccttctaatgtaatcctgaagaaatctaggagatatgtatcattgttttccagacgaaaaaattaagatttggttaaggttgggaaatgagactaagtaaataaagtggtaataagagactcaggtctgtccgatgatactaaaagcctgtgctccttccagaaaaccacgctttcttcagaaaaactgtttttacaagactgtattcaaacatatggcatgtcttgatatacatctaagtaaattttaaaattatatctatattcttaactgtccaataaaattgtgtatttatcatttacaacatgatgttttgaagtatatatacattgtagactgactaaatctagaaaattaacatgcattaactcacatggttatttttgtgatgaaaacacttaatatccactctgttaacatttttcaagaatacaacatattgttattgactagaatcaccatattgtacaatagatttcttgaacttatttttcttatctaactgaaattttgtttcctttgatcaatatcacacttgcacctccatttccagttgccccagcccctggtaattaccattctaatctctagttctatgagctcaactgttttaaatttcccatatgaatgagatcatgcaggatttatctggatatatacctagtagtgggattgctggatcatatggtagttctatttttaattattcaaagaacctccatactattttttataatggctgtactaatttacattcccatcaacagtgtacaagggttctcttttctccacattcttgccaacacttaatatcttttgactttctgataatagccattctaacaagtatgaagtgatagctcattgtagtattagtatgcatttttctgatgattagtgatgtggaatagtttttcatatgtctgttggccatttgtaagtcttttgaaaaatgtctttttagttcctttgcccatttttcaataaggttattttcttgccattgagttgtttgagtttcttatatttttggatacaaattccttattagaggtatagcttgtaaatattttctcctaatctgtaggctgtctcttcactcagttgattatttcctttgttgtgcagaagctttttagcttgatgcaatcttgtctattttggcttttgttgcctttggttttggagtcatgttcaaaaaatcattgcctaaatcagtgtcatatagcttttcccctattcttacatttatgtctttcatccactataggttgatttttatatatggtatgagataaaggtttatatttattcttctgcatgtggatatacagttttcccagcaccatttattgaagagattgtgtttccccaatgtatgttcttggcacctttgttgaaaataagttcactgtagatgtaggggtttatttctggctctctattatgtttcattggtctatatgtctgtttttatgtaagtacgatgctgttttggttactacaactttgttgtgtattttgaagtcaggtaatgtgatgcctttggcattgttctttttgctcaaggttgagttggatatttaatgtcttttgtggttccatatgaaatttagtattgtttttttctgtttctgtgaagaatggtattggaattttgatagggcttataatgaatctgtagattgttttgtagattgtttcagatatggacattttaatattaattcctccaatctatgaacacgaactatctttgcattcatttgtgtcatctttaatgttatacagctttgtaactattataaatgggattttaaaaatttctttttcagatagttcgctgctagtgtatatcaacactactgatttttgtatgttgattttgtatactgcaatttctattataatgaatagaagtggcaagagtggccatcttttcttgctctggatcttaaaggaaaagctttcaacttttccttgttaagtatggtgttaactatgtgtttgtcatatatggcctttgcttgttgaagtacattccttctatacttaatttgttgaggggtttttattatgaaaggatgttcaattttgtcaagtgctttttctgcgtctattgaaatgatgatatagttttcgtcctttgttctgttaatgtgatatattacatgtattgatttgtgtgtgttgagccatccttgcatccctaggatgaatcccacttgatcatggtgaacagtctttttattgtgtttttaaattcagttggctagtttgttgaggatttttgcatctatattcatcagaaactttggcctgtagttttctttttttgtagtgtccttctctggctttggtatcagggcaatgctagattcgtaaaatgagtttggaagtattccaccccatcaagtttttgaaagagtttgaggaaaattgatattagttattcttttagaaaaatttctattaacctagcagtacaagttagctagtttacacttggggctctgaggagatgtaatggagaaagagctgaaattggggttcagatttataaatctcaagttttggttgagcacgaaaggagagggagtgagactaatgataagaaggttaaagtaatcactggattgatttgggatgggcagtctcaaaagtgctgaggattcagttcctatttcagtgagctggaacacacaaacatagaggaaaaagaaagacagttcaagtataaatttgaatatacctaaatgtgtgtaaattacggaagaaacaacttcaaaagaaaataacaacaatgacatgggctacagaacagttaagattaatgatccctcattatagggtgccattcagacataggagttaaaaaaaaaaaaagcaaaccagaaccacacactgcagcagctccccagttgcaagcacactgaaataacagaggcctgccttcacgggaagaggattagttctactgtgacctgtttatataaaaacaatgttgtgggtagcaagattactagaaatgacttcttggattataaaggacaattatgatagcttaggccactagctttcagtacattccatctggtacgttacaaattagctcattattctgctgttcttacgaatgtgttagtctgcaaacatatcattgtcacaaattagtcacctagtgtttctctgaaagtgatttaatataagcacacccacatcataggatggaacagtaaaatgggtccttgctagatcctccaaacagaattcagcataaagcacaattcaatttccaaaggtttttggcacatacatcatcttctgattttctaagatgaaatgtgattgttgccctggatattggtaatacattgtaatattagaaacctcttgggtctccccatgaactctagagatccaagcctactgagaaatgatgggtccacaaattgagcatagcttttatttgtttttatttacatttgttatcgcaggtgctatcacaactgttgtttcaataatagcaatttcaatttgaaaattaacttaaagatcttattttgaagtgtgttttgtagcagatgagctcacccaccagctacttggaaagaagaagaaaagtgaggaaacataaacttcctctgctgtctaactggattacctactgagacatccccttgtgtgggttataataaatatttatggtaaacttcttaagttaagatgcctttggttgcaagtctggagcccccaacttaatggcttaacaaaaacaaatgaggaaaatgtactgtcttataacatgaattttcaaggtaggctattccagggtaggttattaagaggttcaaacacatcacccaggttctgctttgccatcttagcactttgtccttttgctcagacttactctcctcatttacacaggatggacagtcatagccagacaccaggaccaaaggcagaaaatgcaccctttcatgcctgagcaagaacttgtgaagatatatttttaagagagagagaactgagtagtgccgtgagtccaaccctaccctctcttaaagcgggctgcagttatctaactcacattaagctcaaagagagacctggccttcagccatttgatgtccttcccaagaggaccatctgggaaagccagtttggctccaagagcaagagttggtagggatggaaccactagaaaaccaaggccttgatgggggtgctggttaatcagcagcaattggaaaacaaggctcttgcttgagtcaaaggagttgcagccagaggacccagcagggataccaattatgaacccacaaaagtaccatgagacaaagaggcagctttcaacatctgccaggtctccaacatgtgatgccatcttacgatggcactaattcaggaaaacaaaacaaaactcttttcttcctttcctcaccactttctgtgccttccaatcccagaggagtcaataccaacggctagccagcctggatagccaaggaaggggaagagcaacccagtctcaatgccacccacttactccactgcacacagagactctgtggtgggcccagctgggagaggggagaaaatgtaagttcaatcaagtttagagttttgggttacaatttgaaatggacattctaatttctggatagagtctgagatgatggtttagcatgaatgcaaaggtctctattgcctaacagtacccagaaaagtcataagatgttctttataaataaagtttaaagggacagtttgaaagcaaataaaatgtgttttacactttgggagaccaaggtgggcggatcacctgaggtcaggagttcaagaccagcctagccaacatggtgaaactccatctctactaaaaataaaaaaaaaataaataaataaataaaaatagctgggtgtggtggtggtgcctgtaatcccagctctttgggaggctaaggtagcagaatcactcaaacctgggaggcagaggttgcagtgagccaagattgcgccattgcactccagcctgggcaacaagagctcaaaaaaaaaaaaagaaaaagcaaaaaacagcattttgctatctactacatgtcctcattttcagcaaatatgttacaatattgatatccatttacaaatatttttaactaccttgacaataccatatcatatttgtatctttcttgcgtgcttcccctttcttactctaatatttgaggggaaaattatttatgcctcctagcaaatatgcttctgatctttaaaacacctctgctccagcaaatggatcccaaaagagatgtgcattcaaggtgtggaaaacagcaggtcactggggggaatgggaaagttaggatttttattttttatattgctagagacagggtttcattttgtcacccactgcagccttgaactcctgggctcaaaggatcctcttgcctcagccttgcaaagcaccgggattacatgtgtgagccactgcactggctgaaaattagtattaatagtaatgtccttctgtcctagtccactgtttcactttcctttttcttcacggcttcctcctttagactcccttggactgggagtttagcactatcacctgcacactagacctgcagtctatgaagagaggctgtcagggatttggggctatcacagttgctcctcccagagcaaaaaatattcaaccctcccacacacacaggcagcagcctcatctcaaatggactgtgcctctaatcagtgagtggttatggaagacgaggagaaaagtgcatttatattttcattaactttgttcctgcttcctgtagcattttcattttgaaaatgagttgggaatttcaaacatcaataaaacgtgctgaggattctgacaacaaaatccttttttgtcatgtgctatgttgcccacttcctgctttttatttttgctccagtccctgtttgattgctaatctaaagggaaagggagggtcagtgagaaaagaggagaaatcttaaaaatgaatttactatttgatcaggtttgctactttattttgtggaaaattttaaagctcttttgtgtctttatgtattttacaaatcttggaactaaaaacaacagataaaatcacattatattccccattgaattatttcccacatttcaaatgtgcttcccagagagaaaagtataagatacagagctaggcaattcagtttcacattaatagttttgtgtctcatcagtttgggacgtgtattgttcatgttttgctttgttgtgcctattaagtgatttatatagtctattgcgatttttttaggaatggaatatgccaattatagagagaggtaggcgagttaaaagtttcaagtgctcagcattatagattcaccctcgagtcagaatgttaaaaacagcaaggaagagtgtgtaaaatgctaggtgaatgagagggcatctgtccacaatgggcaactagtatttaataactagccttgaatttattctacacttgaatgcaaagattattctacttaattatactacagtgactttgaaactattaattattctaaattattgggttctagtttaaatacatttttatatttttaagctttcaaatgattatttgaaaaaatttatctgaatatcctttttttcctaaaaaggaattctgccttttgagtactaaattattctctctataaatctaaaaatatcacagtatttcttttttttccaaaatctctctctctctctctttctctctctctcacctctccttatctgaaacaaactgacatttaatgaagaaaactgtgaaaaggggttcgagaaaatgagaagctagtattttgattggaagtgtaatagatgtcagtcagagaaaaagaacagtctccagaacatctagatgtggatgtagatgtagatacattgttaacgccactctgtgcattttaatttaagccacttgatcatgtaaccattaattcaatgtcaagttcattcattgtagctattcaatattacaatatagcattaattttaaatgactttatttcaggagggaaggaaataatttatgaatagcaacataaggtttcttatatgatgactcatcacaatgttgattgcaaaaaaagaagctgactcagactagctcctgtagaaaagggggaacatagttactatgaagatacagaaattaacagaaacaagtatagcagggcctattggattaggaaaactgaaattaaggcagctactctctttggggccatacaatcaccgatttctttttgtctctgtgtttctgttctttcctgccttctccctgtaattgccactgtctctttagttatcagtttgcactgaacccaaaatggtaacttcagcccctgagtctacaggacattttggttcaaccccaccttgaactgattagagtctcaatttcacttaggacatttcacattccaaagagcaaatattaatatttgctgcctagtaaatgaatcagatgtcagtgagtcaagttatcatgcttattcccatcagattttataatggtgaagtgtaggaaaggcaaggtctttagaaggaaacataggcagacataagtaatcatgtttggtatagagactcatttattaaatatttatgataataaaatacttaacaaagtcaatgtcaagataataaggactctgagtccttattatgcaccagatactattctaggcattagaggatataccaaggacaaaacagaccagaaaaccccactacccctagagcatgtaccccactacatgctgatgataatctttagtcatctatttcaaaaataacttaaaaatggagtggcaatgtctctgcgtagtcaattcaagatgccgaaataaaaatacatgtatatgtgtcttccttgtgtgtttctttttttttttgtatttctcgtgttgaacttgcatggttttctaaatgaaatattttcatttttaatgtttcatatatgtgtctgtatatatatatgtaatatacatatgttataaatatatacaaatatatgtatttgtaaataacatagtcatatttgcttttatacctaactctgttaactgccaatgatgtgtaattatatatgtgcatgggttagaagtggtggatggggcctttggattttaaatggcattttacctgcagcctctgatgcagcctcttccagcttcctattaaagtgactgaaaacactgcaaaaatatatatatatataatttttaaaaagcactaaaaaccagtactggcagaatattaaagaagcgttaaattagattgacaatatatatggtggaccacacattgtattccattctaaaagtaggaagaataatttcttagttttacctggaccatacaatacatctactatgtcctactactgtagtagtatatgcagcgatatactacttaagatttttaaaaagaaatatacaagcagacctaaaggtggatcaaaactaaagagttaagaatagaaacatccagaggaataccctcttgagatcatctactggtaaaaattcatcacaagagttttaaagagaataataacttttgtaagccccatctgattgaactgccttccccagtaaacctgtgagagtggagaggtttgagtattttcatggtaatttctttaccatgtgccatctggcaaataaaagagttcttttccaggcagtactttttaccaaattcagaggtcggtgaaatattcttacaacaacataaaaatcggtggtaaacccactattcctggaggggaggaagactggaaagaagtatactgacttgtcttttgggaatggaattatggatgacttgcttctttcttgtgtgtttattttattttatttttgtatttcccatgttgaacttgcatggtttcctaaatgaaataatgtttcctctttaaaaagaaactttaaatgatattgaatctagttaaaatgaaactatgtgataagtttcagattttataaatagattgtcaaaatatgtgttaaacattcttgataaaattacatctttgcttcaagcatattgtaaagaaaatggaatctattgacattacaaatagcaattttagcatccataaatttgaaattgtataaaaattgtacatattctgggtataaaatgttaatgcttgtcatgtaactttgtaaaaactttattttttaaagcatttttaggttcacagcaaaattcacagaaaggtccagagatattccatttactccaacccccacacatgcatagccaccccattatcaatatcccccccacaaaagtggtacatttttttttacaattgaacctacattgatacatcattatctctaaaacatatagcttacattagaatttactcttagtattgtatattctatgggtttgcacaaatttatattgatgtatatcttccatttttgtatcatacggataattccaacatctctggcatgtctagttctgatgcctcttctgtctctttaaactgtgttctttgcctttaactatgcattgtaattttttcttcatagctgggcatgtactggataaaaggaactcctgtaaataggccttaagttatatgggtgggccaggcatggtggctcatgcctggtaatcccagcactttgggaggtggaagcaggtggatcacctgaggtcaggaggttgagaccagcatggccaatgtggtaaaacctcatctctactgaaaacacgaaaattagccagtcatggtgacacatacctctaatcctagctactggggaggctgaggcaggagaattgcttgaacccgggaggcggaagttgcagtgagccaagattgtgccactgcattccagcctgagctacaagaacgaaactctgccaaataaataaataaataaataaataaataaataaataaataaataaaataaaaaagttatgtgggtggtggtgtggtaaggggcagtggaggggaagctttctatcattccataattaggtttcagacttttggtgagcctgggcctctggattgtgaatctcctaagtgtttttcaggttttttttttcttataccataggtgagagagaatggctaacgtgggctggaattgagtatttcctttctccttgatggtaggctagagtgggctggagttgggcatttttctttccccaggtcagtgaggctctaatataacaaaacaaaatggaacaaaaaaccccagcaggttaggctctgattaactagtttctcctcaggaagaaccaagcttcagcagatttaaagatgtgtactttttcccttctcttgctggaagcatgagagaatttttctccaatatttactgtgagaacttggtagcactcctggaggtaaaacacacagaattgtggggacctccctattactgggttcctctggagtttttcaactttcagacttgcctgcactcagcctctaacgatttgtcaattatagttgaggtttttctaccccagcactggttctcttggaggtttctgctccggtatgttgtgattctccatagcctactgtctatctcaccagtggtttgggcagcagtttgccctgtgacctcacttctcttatggatctaagaagagttgatttttcagtttgttcagcttttttgttgttaggacagattggcaacttccaagctccttatgtgaggaactgaaagctggattatgttacttttttactgggaggttgagtgatagaagaactgtcatcagaagtttaattaaattatcaatcagtaacaatcaattaaatttccagtgaaagcaaatctattttggatacatctaatcaggataaatgaaagaataagtgtgcattcttacaacatttctcttttttttttttttttgagagccattacaggtgcgaaccaccatgcccagctgataatatgagtaagttttgaagttgggctttattttattacatgagaaatatttttgctcctttgaattttctaaacaaatattatacaaagcctttagaaaagcttaagatataaatgaaatgtaattccatttcagaaggtagttttgacattacattatttgtattttttcttttttttccattttgattccagtaaattgcaaaacaaatgatctgtattttattatattttactaagcaaattttaaaggtatatgcaaacaacatttaaagagctcttcttattaaaaaattttaaattataataagttaaaattataataatctaagtgtttgtattacttccatgctacggataaggaaattgtgtctcacagaggtttcatgcgttggtcaaaattacacaaaaagtaaaaggcagaacctgaaaataagggttcacatcttaggactccaagatggtatacacatttgacttttttgtctttaaacttgctgtgaacatttttccacttttgattcttaagtataaatattaagtgccttctttgtatttcagtattaggcttttaagtcttctacttccaaaaaaaaaattaaaagtaaaatttaacaagcattctaaatattccaattatgaaatatatttcatattatgagatttttcttctgtaaaagaatttatcatttaagattagaagatttaaccttgaggagtatgatccaaaatggctttttatattagttgaatcatgaaaagtcccaacaaagcatttgctggttttaggtgatgaaactaggtgtttaatgaatttattttttcttttctaattggtgattgtaccctgggttatgagaatatgtagaaattgaatgtagtagctactagcaacttgctgaaacatgatgcatttccctgactctcagcaactgaaactgcggcttcatgaaaggcttctcgtatttcagttataaatgttcagaacagcatgccttcagactttgctagaacttgccaggagtggaaagtcatgactatcaacatcgttattagttaacattgactgagtaccaacaatgtttttggtgttataaatatagagaagaagacactgttctgttcctgggggattggctttctgtaaaggtgagatagagaatttggtcttgaatgttcttttcttgctgggaggtggggttggaagcacagccacctcaggtctcattctgatggcacactcacctctttattagttgatgatatatgcaataaaaagaaaaaaatgtataattacacatacatacacacatgtgaaaactcatgtaaattttattttttattggtaaaaaatatatatttatggggggagcttgaggcaaaaagtcacatcctgcaagatatccaggtgacagtagcttctatatccttgtgtataatgtatttatactgttattaatagtatatagaatgtgctaagaaaagtacatagaagtttttgtatgtgtaaatatatttatatgaacccaatatgtagaatacagggaccaagtgttttgtttttgacatctaagggacaaaagtaatccagcctcttgaaagaatggagactttccaaaaatatctgaactgattattggtattcatataagataaataagtcatcttttaggtctttattctttgatgtctaaatatacaggagttttatttcatcaagttatttaagaggcaaacattgacattagctattgattataccaaaatgcaatgatgacaaaaaaatataccttaacatttgacattaaagttactttctgaaagtgaaactcagggaaaatcaatgaagtaactcatcacaccctctgataagtacaagtgactaaagagtctaggaaatacccaacctcaggaactagggtgtgactttattatactatgcttatactagcataaaggttgaacttaatcattcttttatgctcattgtgaaggaagtgtgtaagttgaaggcattttaagaggatgaaatactgaaactgatattacagagataagaatttgtgtagaaagtattaattctgtatttctactgttacatttttgtaattttttttaaagagccagactttttttgtatgtattatcaaactttgagataaaactagttaaagcagaagagctcttgttgaaacagcacaaagtacctggcttcctagacccagcacaaagtaccttgcccctcagctgacctgatgcaactttgaaaaaccatagggttcccagaaacttagtttgaaaaccttcactcttatgagcataaccctataaccatgagagaaaagggttttattggaaaaggacgtgggacaccggctagttaatacttctggctctgattctggatgcattaagcgatctttcaatgaaaatgttgaaagtattttggtttgctctgagtttgtagtttatcaattaattgagctttttattgaatcagcctcatttaagggtagttaatataagttcacttactcttgtgcttgctgtgggattaaaatttaaaaaaaaacacaaaacaaaacaacaaaccagtctttgctctagtagagctgaggttatgccatagctgcagggacttcactgaggttatgccaatttgtggtgccctgctaataattcgcactcctgtattgataaaaataatggggctgagattagccataaagataatcttttatggttactcctgatatttctttttaatttttttagagacagagtctatgtttcccagcctggtcttgaaatgggctcaagttatcctcctgcatcagccttccaagtagctaggactacaggcatgagcaaccagaactggcttcctgatatttcttaaaagtttcatgaaaggatgattatcttttagtgtaacaaaatagattagcattaccctaacccaacaacattttttcatttttgacaacttgtttttagattacaaacctattagttctgcctaactgttgtttcttgaaggccatacatgtaggaagtattaaatttgtaaagtatcagcctataaattagtagacataactcttaagaccctctttctaatataaatggaataaaatgctggaaatgagttatttctattttctaagcaagcctattcttttatatttgttgccttatgtctgcaaaaatattcaattttggattgtttaataatgtgtagtcttgattctctgaactgtgaaataaattacagttttttctttgctatctttcaagcagaaatttggcttttctgttatttatcatagtttctcagttgtgtttccttttgttctaatttgttagactttattctagacagttgcatgtataaaaataaaaatccaacgaaaattcactttaaaaatattcagctaaaatgtcctcttagtttaagtatatttagtagtttaatggccaaatcatttgtattttatttataaagtgctttgcttatatcattgcccgcaaatggaaatgtagctaacaagtattgaatgttgaactgtgtggtagtggagaaagattcagaggtattcttactatcctatcacccataggtgatggtttgacatatgaacagagtagaataaaatggactaagaaaataatgtcagataaatgatgttcattacaaaggaaaatatatttttacatctttttaaaaaatctttgcatttgctactttctatggagacctactctcttgtataaggactgaatgttagttttaaaataattaaaacccatcattatcatcatcatgatcaaagatcactaaccagagtcaaataatttgaattctcttccagatctactgctcacaagatgcctgataatgaacaaatacaatctttttggcatctccaaaatgggcataataaatgtcttaatctcctcagcataattctgtgatgccaaaataatacatataacaataatattttagaaagtataaaagtataacaaggtggtattattatgattacagaggtgctagaatattgtggtaatgtgtacaggctctggagccagacttccttgattcagatagtgactcactagatatttaacctcagacatgctacttaacatctgagtgcctcaatagcctcatctggagaacagggctagtaacagtccttaactcatagtgctgttgtgtggattaaatggggtaatactgtaactatcttagaatgggacctggggcattgtagatgttcctagctcttaaataataatatttaaatgtctaatataatatcaaaattttaattacttgattcaaaacattcaaagcttgttaaaaacaatgtaggctgaagttttctgggccagattacaaatgaccttatggaagagatttagtccctttagcaaaaaggggtcatgaggacactgcctaggctacaggaaatctcaacaaatattctcaagattcttttatgctgtagtggcatctttctgaacctacaagttcacattggcttttaaggaatcacccagttcttcttcctcctaggaatcctccttttaggatcatcttttgatcaaaatgaaaattctccaaattatggtggtttttaagattagttttctttatactaggttttgaatttatgggacatgccctccacccaatcttgggtaatattttctgcaatgacaggacctcactggggaaatcctaaatgaagataatagcatgttatattaaatgttgccggtattccatttaatatcaagcaattgcgtaaaagcctttttaaatacctaagttaaaagtggtatattaatgttgagtgtacttctactgcaaagtccattctcccactgatttcaaacaaataccatttaagtgccaacctactattacaagagtttactattttattcttgctccaaaatggcatcaacagtgatggggtgcttttgggggattattgaacagaatttttgcaacaaaggagcaagcatgaagaaatgcaaaacatcagtgatagggattgcaacgttttatctcagcattcctcatatctacacaccccctaatcaaacaagcagttttatggcatgcgcaattgcaattgaagtacaactgacttctgcagaaccggcttccataggatttcctgtccaaaaatcaccatgtggtcatctgcagctaaatggttacaaatcatcaagtaaacaaggcttccccaccccggtgctttttttttaaggagtgaaatccaccaaactctatcatttgcaaattatctctggacttcttttatttctttttttttcactgggtaagaaggaaaacgagcaaacaaaaaatcctccctccgtatttgtttaaggcgtaatttccctgtgaggtgttttacaggcttctccttgtttagcttttcttgcctggtaattactgaaagaagtctgctcttccagggcgagctattcctttaaccccttttgcttgctcttacttggaggttagcaaggagtgcgcggctctgcaatgtctgggaacccacctagagggcccccttgacgccagcacatcccctgtcaggcagcagtctctgcagctgagccaggctgctgcagagttaatgtacagtaccacggagcctgcaagtgtcctgagctgatcagagctggggcggcacagcccagggcagacaaggcggctgcgaggattccaaaggttctgctggaaattcggcgctgggggactccagcaggagcctgttgccattgtgttttaaaagcatgcaaggtctgtatagcttgggcatgagaatctttcagaagatgtcagagcatcagaataaatgacacctattggaaaactgaatttggggtgaaaaacaaaagagattgagagaggaaaaaaaagaaaagaaagacatcgggggaagaattcttagacaacgtctgacttgcagctgtgaaattcattttctttccaaggcaaaatatgaaaagctcccacatggttttgataataacaaaataaaggggattctgcagtgaaaagatcaatagcttagtcattttacttaaagagaacagccagccttattatggggttaggcagcagaaatgaatttcatcgtgacagcatcttctgaagtcatgatggtagttaatggtaatcttgtcctgcagagcagaaattactcattgccttcctacttttgcagttgaaccagcaattctgaaatctgggaaagaagttggctttggtgatacatggtttctagcccctctgcccaggcctttgtccgacacgtctcagacggtagcactgcgttaaagtgaccatacatgaatatgtgcctaagaaagaagaaaaagcaatattcatttctaaaggacagcatggcaaagcaacctgaagttttccatttcccttctaacacttctttaacaaggatatcaagaaactgtcttttgactcctttcttcccacattccagagtccttccttaaggatgcattaatttacactcaaggcggttagattttaccaggacaatatttgccaccatttaggattattagttgaactggttattttagtatgttgactaactagtggaacctaaatggatggacccatacctgcagtgctctgtgatgtttcttttttcaaatcctggaaggccttttgtaattgctatttgtttttattggtggggggagattttttttttttttttttgggattcaatacttgttgcaataattgcccacgatagctgctcaaacaagagagttggaattcatctgtaaaaatcactacatgtaacgtaggagacaagaaaaatattaatgacagaagatctgcgaacatgatgcacgtgaataattttccctttagaaggcattcctggatatggtgagtaatcaatattcccttcagtttgtaaaactcagaattatcaaattccgtgacaggtaccagatgaggatttgtcttgaactagagtattggtatcaagtgagaatgaaaagtaaactgtgcaaaaccgaatattgtctgagaaagtaatggttatgcaataaaaatactttgttaatatgaagcatccccaaataagtcaagcatgaggacttgagaacatttaaattgctaatatttcatggaggaagaaaaaaactttgagaatggcaacaatttaataaatttttttaaagatgaggcttagggtttgttttttgttgttttgctatttttatttgaaaattccctggggaagggcacacatgaatttctgatatatcaatttgtctgaatttctaaaagaaggttaagggaaacttagaatgttgactcaattttaaaataatgctaaaatgtgttggtgcctcacagttaaggatattttagctattcaagaaatatttctaccagaatgaaccagtagaattctagtagaattctaacatatgaatcaggaagtgctcaggctctcatagaacttgcttagtgccttgatatttggtcatctattaaggttcaatgcaatgcattcaggtccctggacatgtgatatcatgtgccatttcttgctggagtttatgactaaatgtgtgtaggaactcattgctgagggtatttataagagcaaaaggtcattattttaaaattgcttgtttttgccatacctttagggtcagctggattctgactttcatagcagaaactttgtgaatgcataataaaggcacatgttaaggcttagtgtctgctaacatgggttgttttggaaatgcagtttgtctgattttgaaagtatatctttcaggtaaatgttctggctggactctggatgaataatagatacctaaatataggtttcggagggctttccagctgcttttatgacaatgtctcaaatgaaagctccctgagagcttaaggtaccaccaaaatcacctgctggtttgttacagagttttcggctttcagctaaaaaatccattgcagagaaggatgggaggcatcctctcccactctaggcaggtgcttattttctaacaacaccagatccatccagagtcgatgctgtggcgtatctaccttttttgctgaccagagctactatccccagtctctagaatgcttgggtgacatgcctgcaaacctcggtggcccacttccaactgcatcaccagagtttcctagtcagggggagccttggtgccattgccttgcttgttctgttggtgagggtcaggcatcagcaataaggtcctcattattcttacagacaaatttacatcaatagtctttaatcttgagattaaaagatcctggaaacagttcctggcacgtagtaggcatttgtcaattatttttcttctatgccttaggcttttcttcagagttcattttatacctcttaagatttgcttgggaggggaaattaccagtctcctttctatcaagtgtaccttgctacaaagcaacagtttttgttctacctaagttctgctgtttaagcccatttgtttatgttgtaatacataggatccatgtactctttgaatgcctgcaattataagcactttttatttttattgcattagcctcacctatacttttgactggaaagaaataagctattcaactctgaagttttggaaagaatgcaaatttgcttattcatgctcctctagatctgtaatacatatgtttgaaagctgtatggagaagttgagagtcctgttggttttcttttgtgcctggagttaggtaacccttcatctgcttcactgcatgtcgtaccaatctgttgttgttgttgtggccaaactaagccaatgtagaatgttaatgctctgtataactcctactcttcctgggccccttgcagggattcattaatatgatgttggactcaaaggaagaaggtggtggtttttttccaggtgacctaattaattttgtgcttggttcttgactttctcaatggttgttgttttcctcttatttatagcctccccttccagtactgcagtaagagattgtaggggtttgttgacagaaaaccctctttccctttgtcctactgtaagagcccctatagggtgagatttcaggctcgtgaattatcgtgcttagaataaaggtctcgccaaattgctcttttcatctccaaagactccccctatcctcattctcacatttagagccttttcttcgtgaagggaccgatcagaagttggcaacaggccagtgctaaggaataataaacattgtaaaagacatatgtgctttggtttcacgagccctagctcatctctagaaaggctctgtaccctttggagaggcgggacttggcatgtgctggtcctctttctgtcctgctttttgagaagcaagaatgagaaaaagctgagacacaggaggtctagggtagtcttcaaattttaccagaagtagtaattgaaatagaagcctgtgcacagagttcctacttgtactctcatccacctgccctagggctggtgtgttgattattgagcaatagtattacaaattcactctttatcagttatgagttaaagttaataagtggtcctattacttggtttaatagaacactaccccttccgtgctaaaagagtggtatgaagaatgtgtgtttcttctttgaagctacattagaaatattagctggaggattttattgcgaaggcttctttccattacacttttcagtctttttactgccaagccaaacaaagataagggtttgcctcactggatagataagtactatatagctcttcttatttttccttctggctagttgttagaatggagagatagcctggcattcaggaacaagtatggcatggttgaaagaagggaaatgcaagtcagctttctaggaatttaaatttcatgtagcagcagttaagaggacctttagaagcattatgacctggaatcacatgccagggtctaacatgaatgacctaacacagtgtgactaacatgttcagctttttgcctgacttaaaagatatataacaactttttataatcttatttgtaaaaatactataatttcatgccagaaacatcaaggctatgttgaatgcaattgaatttcatagctaaacaatttaggagggcattttatttaaatacctttgcatccttttaatgatggattcacatggctaaaaggacagtggaagatagaagctaaaggccctggctaggagaggctgtggaatgctgccatggagggcccctctgaggacaccagaggaagatttgggattaatgattgtggaaggtgattaatgatttgcttatttggtgcttagggtttaatttttaaaggtaggacatctaaatgttttaaactgtctttgtgatgctgagaggtaactccagtgaagaggcaaaatgaggtgactgtggcactttcactcaacatggaggcatctttttccttcttctaggaccctaaattctttcattagactgtccttttccaggtatcaatttctaaaaggtttagtctagaaagttatttgtttgattgttcctctatagaccaagcattcaattcataaactaactcatactgttttattctgttttgatctaaatcctttatggaatgaagcaagatataaatcagtatattgataatatattcatatatgtgttcataatttgcatgtatatgtgtttaaatctactaatataatgaatacgtattcagagaaagtcagaatggcctgccttctaatgaaaagataatccttcctatctagcctcatagagtttcatcttttaaggttttctcctcttcatacattgaaattacagaaactcaatccagaagtgcattttccagagtatgtgttctgaccaatacattatattttattagaattttagggggtgggagcaatattgagtttgatgactatgtatacgttgaaggaaatgacgtatcaagtctcatgtaagataatggagctttgctccttttagttaacttaaaattattgcagtgtctgcttgtcttccagtgaaattgcaggtaatagctgaccttgcttctttaacatctcttcctctgggttacagaacaacccagaaattctaaaatataaataccagactgccagcttaattctgaattcctgttggggccaaatacaatttacttgtaaacacttaggaccaataaagtttagatggagctcataattatacaaactcatctcgttcacaaatccctagggctcaatgttaaagtcagccattgtttaaggcagaaattcaggtttagatatagtgtagcaaagattttccattatatgagatatcgatcctattaaacataaaacttttctcttggctttctattttactgtcttttgttgccatcagctgtatgccccttaattttttctagtaataccttggaatttaaaaatgaaattacaaatgtttatgttttagtgtttttaaaaataattcgattaagtatgctatgatagaggagcaaagttgttattagtaatatcaatgtgcttacaacttatggaaatgaaaaatagtctttagtcctagcagcctttctgctgtagtaaaatagtttgtgcactttaaatcgctgtgaggttacatcttcaaaggactgagtggcataagccagggaggtcttagaaatcttacaaaaggaaaaaaataagaaattattcctcatcatatgaaaattatttactaacaatgtatgatgttttagcttcttttaaattcttcactttccactcctttttgcttcttccttttagttgactattactgagttacttacactaatgttgaggtatttgggttcagagaaaaataggcaagtaaaggaaaattgaaaatagtttcaaattctgagatgcaaagaagaacccaaaaaaactaaacaaccagttttttattgccataggtcgaatgttcctttttaaaaaaatccctcatccttttctctcctctttcaatcatatcccacaaacgttaatgctcattaatactctgtctagctatagcattatccacatttttgcaatagctcaaaaatgtctccaagccataactgctgcaactgcttataacttgatggactattaggtgacgtttccagttgtttgagaagtaccagcctataaacatacccaagacaatatattacaactagggattatgttgtgtaaaatttatacatatatatctctccatatatgatttcaaggatagataatctagagtctacataatcaggctattggctggaaacataaataaactaaaaaaaaataatttaaaaaaagcactccaggtttctaattcagcttctggagtgttaatgttttgtgtgaccttctgaaagctctttgagtttttaccacttttgaaaactattacagcagatatttacccacttcatgttaagaagtaggctattaaagaaaatctcatagcacattggtaataacaatttattagagaccagcctgaacaacatagtgagaccctgtctctctctctatttttttaaaggtagctgggcatggtggttcatgcctgtggtcccagttactcagggaggctaaggtgggagtgtctcttgaattcagaaggttgaggctacgataagccatgatcatgccactgcactccagcctgggcaagacagaaagaccctgtctcaaaaaaataaaagaagaatttattagaatgttgacaatgacatgccaaaatctcttgtataactatcatatacttcatggaagagatcaacactgttgagcactcctctgcatgccatatgttttcacataagttacatcctttaatggcaatataactttctgagaatttcttatccaaatccctgtttgcagatgaggaaggtaatgttcacagagattagataacttgctgaaagttcatatatctattgctagggaagctgacccactcaaaaccaggcctggcctgattttagagcccaatatatttttaatccaccatattgttcttgtggcagatgacttagcactcttgtttatggatctttttgaaaattagattagcagtagaccagagaaaataagcagatttaccctgttatttagcagcctggctaagtatgtaggatgcttactgaatgtgaatagcctttccttgagaaactcttccttttaatgttagaacaatgacctatacttagactgtgtcagcagctctttctgtattttctcagaatgagaaatttaaaaggaatttgtggtgaactctgtttccaaggtcactgtggcctataggatcctttcactaaaaagtgcctctctggacgatatattaggaaaggtgtcacactttgaacagatgaagtagaaatgcaaactacagtacttggtgaatggacagagcctctgttcaaagcaaaagtcactcttcccactgggtacacacttggtgtgtggagcatagatgaattcagctctattcaccatctctgcggggcattgttgagccctgttcaaactgcctatctctggccctgctttgatacgggctccagctttactttgtgacagatgaaatggttttgagaatgctttgccaaaaataaaagatcatccacattttaggttttgctgccataattattactttcttcaaaatattcaactaattgtatgtctttaaacttcattttgtgctcaagtaaagaatattagtattatctgaaatcagatccaattgccaaagaagcattttaatcataaaatagcccaatttctgagttactgaaaaatgtcatggttagtgaattatattggaacaggtggaacacactgagttatttattcataggggatgcccagatgaatgtaataagagtcctgccttggagatactcataaactagtctggagaacagccacagaaacaaataattacagtatagtatggagcatattaatatagatatatacaagttgttacaggagtcagaaggagaaacaacttaactgacttgatccaaataccttaagtttcaaagtgaaaatatatttgatggatttgggaattagtagttactgataatacttcagagagtggtttaagggagtgtctgggggtaagttatatttcaggggtaataaaagcagagaaaagttgtgcaaactacttctttcaaaattttgcttaagaacgaaggaggaggagaagaagaggaggaaagaggagaaggagaggagaaaaacacagtagctagtgaagaacaccaagcacttttaagagtaggaagcatgtccctaaggaaatattctgatacagagctgggaaacttgtggacatgacaccctctgggatagggggaggaaaaggagggagaatgcagataatgtggagattaggtaggtggaaggagagcctgagggagtttttgttttatgccctgtgttttctctgggaagtattaaatggaattcaagatcacatctcagaaagaggaccagggaggagcaggtggaggagcttagtaagatgatggaacagctactagggggaattggaaaggttattgaagagagagtacaagacagtcaaacaagttggaaaaaggtcagtgatgttgaatgaatatatccagtcaataaaagacgttttactctacttgagaaattatttacacaaagtattatgtcagggaaatgagtagagatgtgacagaaatgttacaattcttaattattaaatttgaaactgttttgtgatgagaatgtctcctatggattgtgtttcttgggattccaaagaatacagagttgatcttaattgttgttgttgttttatttggtagtggtggaaactgttttatgaacatattaattagattgcagttccattttcatgacctgattttttgaaaatgtgagatttcctgtgctgccttgaaataactcttgggtgacaaacagaagctttaagatgtttgctttgaattttatcttcaaatgaataaaaatcacagtgggaagaaaagccaaaatgattcagctttgctccctttttaataggaacctttctgtggtttatgttagaatgtcacaaatccatatatatgtaacctgcttttacaaaaatttcttcaaaaccgctatgaagcttacttgaaagtgtcaccagtctctgagaaatgtactggaaataaggaaacataatatgactttaaccagaactgatgtaacccagtttaaatatttatacatttaaattctcttttatgtctccaagataaataggagaaaatgacaaataaaatatgtaagttaagggatattattaaatagccttataattttctaggtcatgagaataaaccctggaggatactgtgactttagccaatattatgaattcctttcatctcttctaatcatctcagcagagcttccgctattattgtcagcattcagtgctcaccactactttatacagagcttgctttgtagaatttttgctgtggctctaaaactctaaataagattctaaaagtcttagtcacttgtcagggaacttcattcttcctctcccttgagtctccatatttttcttttctaaatatgaaaatgagaaggttgacttaactgatcactaaggtgctataaaaatctatgatcttatatcttacctagttaatttactcatttctgtcttattcaggcataattgttcttccattaaaggtaatgcagagaaaccacacataaatcaacaaacacctccaggactgagctctgatgcttttctcaagtatttggcctctcctatggaatatccttagcctgtctaccttgggtattttgcttaattccttctccacaaaacctaactttaaatggcagcctttttcatggggaagacagcagcgttatgcccgttaatgctgatatccacagtatttgagaaaacatattccatatgcaacctatacatttctcatatcttcccaactcttctcttgataaaggtctcaggcccttcctttttcatatatcctccatttaatttaaggaaataacatgatatgaagtcctcaatcttaagaaccttgtcattgggttgctcactatgtttaaaacaaataattggcgtaatgatggagagtcccttgatgttctagagaagaaaggaaagctagcaatgtgacagtgggcaaattgagaaaaccgtagtggtattgagatcagtgaaagagacctcttacaagtcctaaagtaaggcatttgagtcttaaacctttgggtgtgttaattttaaaagaagaaaatatttgtgggaaaagtcctattttttagaaaataatctgtgccagatttgatttttgagagaggttgaatgctaagttgcctcaggatgtcatcatttgaaagggtgaccacattctgtgagatcttcactgcacacaaccttttgcttcaaagaactttctgagaccaagctagcctttgagaccaggtattaacattataatctgttctattcattgcagtagccacctcgactacttttttctactttataccacaatacccagcatggtgttgtacttaataggtactttttaaattttttcttaataaataattatgtgtacagaaaagaatgataaataaaaattatattgtcaggggaaattttaattaaataactttatatttttcaaataatgttattgtgctatgttttgagataaggtagggtcgtatgctataaaaaataatacagataataactatcacatttaacaggttatccattccaagtatagactaatttttttatagacatcattttacttaatcatcccccaagtctgtggcaagggcttgttatctacttactaagggtgcaaccttgggtcacttatctaacctctccatgatctgtaacatagggacagtaaatagttctcattgcatagggttgctgtgaagattaaatgagaaaaccagtctagtgcttagaacacctgtcactcagtaagtatccaataaatattgttatagtacagattaggcaactagctgtgaatggttaaccaggttgcctagggtaatcagtggcaggccacttccaacctagatcttacccattaactataggttgcttggaggtctaaactgcctcttctatatcacattcttgttcagtaaatacagggacaataccttgggttaagtttgaattatgagggataatttatacctcctcatctctcaagcctcagcaagaatcgactgatgtgccctcccatgttgagtcagtgcctaccttatacaggatggattttctgtttatgactgtcttactcaggccctgcttcattagattctctgttcttagcacagtgcctgacacatagtaggtgctcaataaaatgattttagagtaaacattacttttccagaattgtgtcctgggaatttacggcttttaatattaatttcaggtttttaggatatagcccatgtttttggggggatagatactgtttctataaaaattgtcatcttgagcataaataattcccacatatcttgatttctgtcacttgggagagtttaactggatttgtagaagcaaccatcctgccgaactgggtgtatctgtaaaatctaaatgctattgctacaaatcaccttatctaagacaccatttcttcaaaactaataactagctcattcactttcatataggaatctttctttccttgaagatatgtatgttttatcttgctggtgagataaaagtctgtaaattatctccacagctggctctgatgcttgattatgcccctttctgcatctataacattgatgtttcattttaattacttttcatcacagtacatgatgtggtcttcagacatagaccagcctctacgtgtggctcttcgttctttttatacatctttcactgtcaaactaagctctaaaaatcatctccctaatatctcttcacttgccaagaaaatgtactagctttgtattatatgtaatacagcataaagctctgcctcatctggcctcctcctttctagtctcattgtagaaatgataatttttattaatattatcagtgttaattaatttctctcattattctagcatacatatcctatatttgagtttttaaatatatcaattctttagtatagtggttataatcacactatatatgtatagaatgaggttttattctcactttattatgaaagagtatcaataactattttatatcattatatgtagttttgtcagagaacatcctgaaaaattaacttcaatgttttaaaaagccatagttctcagtgtgatggagatggtgaggattggagaatgtcattagggaaggcagttgtatcatttatcagaaataactgcaagactttgttggggggaaagtaataaggagtatgaaaatctggaggttgaagagtgggtaggaagaggaagtgacaggtatattttgataaagcattcgagggtttcatacctctctctcttaaccagtagtacaatgcaagggaaagatcccatgctttaaagctgtattgaaccaagttcaaattcaactctgatgctgactggttaactttgagcaaatcaccttttatgagcatcacttaactcatttataagagaaaaatagaacagttccaatcacccagatttactgtaaggattcaatgagataatacattatttaatttgtcatttttaaaccgcagcttttcccaggcagcatttaagacaaccaacaaagttatatgtgcataacttatagggagaatgttgatgaagggcaaagagaaataaggtatgatgttcctactcacatatgtatgtaatagttaaaaaatatatatatatatattacctttacaaacggcaccagaatcctcttggggaaggaagaaaaatgtctttgctagaagatatttatatatatatatatataaatatatatatataaatatatatataaatatatatatttttatatataaatatatataaatatatatttttatatatatatatatatatatatttttttttgagacagagtctccctttgttgtccaggctggagtgcagtggtgtgatgtcatcccactgcaacctctgcctcccagtttcaagcggttctcctagctcagcctcccgagttgctgggactacgcatgcaagctgccacacccagctaatttttgtatttttagtaaagatggggtttcaccatgttggcctggctggtctcgaactcctgaccccaggtgatccacccatctcagcctcccaaagtgctaggattacaggagtgagtcactgcagctggcctagaagagctattttgaacgtgcccttgggataggaagaaagtccctgaggatctgactataggtaggtgctcaagtgctctaagggtgaaaacttctctgcataacagaagaagaatttagtgctaaagagccaatgagaatgatggagatgaggcagagaaattaggagagaggacaggatgaggaaaattcgccctgggaaggctgagaactgcgggtatactccataaacagatccctccccagtactgacagtggttcggtgggtgaggggtattggggagggtacagggagttgctaggggtgggaagaccactaatatatgtatgtcttacttgaagcctcaggagtacctgaagtaagtgattttgatggtgttggtggcatgtgaatcaaaatgagctgtgttgtgttggcaaagcaggtcaatgagcccagcctttaggaaattatcagaaatttagaggtgagttttgggattcttactggtcatgaaattaggaagttcaaatcaattttgtttagatctcaagggaggcagagggccttccatctttcaagagttaagcagaccatgaagtccaagggtatgcaagatggaatgtaaagttctcactaagcttcctaggatccagggtaaatcaggaagcttaaacacaaatccccgtgtccattggataaacaatttgatggatcagggaagcacaccacttatgatactaagatcagaaagaaatttgtcctaagttgtgcataaagattaatgatatacatatataaatcatggtatctgctcaacttagtgtgtttgatatattttagttcctctcctgtcccttttttcccctatggatttctgtggaagattgtagtatatttgaaagttctttgaaaattgtaaatactattgttagtttataattaaaagaaagcggccgggcgtggtggctcacgcctgtaatcccagcactttgggaggccgaggcgggtggatcacgaggtcaggagatcgagaccatcttggctaatatggtgaagccccgtctctactaaaaatacaaaaaattagctgggcgtggtggcgggcgcctgtagtcccagctactcgggatgctgaggcaggagaatggcgtgaacccgggaggcggagcttgcagtgagcccagatagcgccactgcagtccggcctgggcgaaagagcaagactccgtctcaaaaacaaaaacaaaaacaaaaacaaaacaaaacaaaacaaaaaacctgtgtaccagatttcattaaaatctgattaaatactattaaagaaagtataataaaatagatagtataagaaaaggataatccaaataaaaaatatgtttcttattaaaaaatggtatgtcttgccaaattttgaagttaaaagcacagcattctcacttctttaacccaacttatagcccattatagcactagattttagaatcctgagtcctatgccatctgtaatggcaacagtcttacagggtgatacaaccttttgtaattcttaaggagacttgaatttttgaggcaaatgttgagtctatacgtggacatttgttgtgtaagagtggaagtggaagtcaaaattctgaacaaggttgctcccaataagatctgtcagctcacaagattgcttccctaggcttgaaatgtttcaagcacaaattcaattcataaggaaaatgagaatcatgaaaatgattatgaaatagcaagcagtctggaaagaggatgtagacgaatgccaaagcttctggaatttatgaaatatttccatttatggggccaggtgaaataagttgttctttcagaaatgtgtgacatggctattatatattatccccctaaaactatttgatcataaaacaaaacaacaaaaacaaaaactgataaacagcaatgacaaaacaactaaataaaaaagaaatgcagttcttgaatacaggatataaaggctcagtgcactttttcattttcttattatttcttttccctggctaggtgagttggctgttttatattggcactaagagtttgataccactactagaatagtcaagtatttgacctggccatgagtaaaagatgtttgattgacagatgagtctatctgtgtcaaacagctttaccttgagaaaaatcacaactttgaaagcagtaacacttcaaaagaatattgaagattgtggccactttcccccacctctccccaaaatctatcttcattcaagttcattataagcagctcctttgggtaatttgggttgcgtgctttctccaccccttctgtatccttggcttcttcagagcgtcaatcaagacaagcaaaagattcaagaaaaaaagggaaatgacctttcagtacctgagtcttcacaccaattcatcattgctaagtgctccaaaactgctgagtacagtatttaggaagtgtccagtacatcagcctggcatatattgttcttaacttgaggttactaatgcctattgcaaatgtgctttacgtcagccaaatgatgtgtttaaaaacctctatgtctagcatgaagaagaatctctttcattctcatgttaccttaaaagattttcataccaatatacatcagggaggagcaaatttttgtttcatatgttacacatgttatggtgcacatgaagactggaaacggtagttatttgttgggcatgtgtatgaattagtatgtaaaatacacagcatttttttctcttctaagttactaaatattagatatttaatgtatttcttttgctttgctaatttattcaaatgtaatcctgactaatccattattttgttaacatgtctacttgattaatgtgtttttcccctcttctaattctgatccacaaattttatagctattcattgtattacttaatctaagtccactaaagattatccttattcatgtttctccattaaagacaacgataatatcattgagttagcttagttcggatagaaatttggctagcattcattatttgattttcttggagttttgcaatttttttttttttgcatatttgtcaacattgtatactcctgaaagcattgtgtttaaaatacctatttcttgatcagtagaattgatatagctgacttacacggatcaataacatgattttaagagcatttcaaggaaatctctcatctgcattgtctttttttctaacacagtttgcactatttacaagtgaaaattttatattactttacatattttcctgtaaaaattagaaaactgtattctttggcacccgaatgtgtccttgaattattaatttgttaattttgtatgacatccttatttattagagaagcaataatatttctcatgggaatgcatgtattaatactttcagaggtccagaaagtatcaggagattaaatactgagattaaagagtactctcttcccactattatgttcagttctgattttccagctgtgtagctagaacaaagaaagaatgtgggttttttttaaagaataagacaaggctagaaggtatgcccttgtgagggcgccactgactgtgtcatcacaggagggccctgatacatgaatattcggtctccaggaagccaagtatgatattcacaaccacataataatgtgctaacctcattcacggtaatcacagataatgtagtatttgtgtctgccatacagttttgaaggtaaaatatggaacctattttggaaatttcacataacatcttaagctgtattaatagaaccagaataacccaaaataaagaggtaatgaatgcacttgaccctgcatcattcagacctcagctggaatattgtgcttccttttgggctgcagacaaacagaagaggactcaggagagtgacaagagaggaagcaagctcatgccttgtcacatataaagtggttgaaagactgcaattgttagagaaaatgatgcagtaattgaaggatgggtactgggaagaggctagttctttgaggctgctaatctgaaatataacaagtggatgcacctgcagtaaaagagattaagccccagaatgagtctggatgttctaatggtcagaacaggcatttcatatgacatggcctgcattggtccaggtggcgaagtaaggatggacaaacatgcgttgtttgcaatgataaaaaatcataagtagatgataacattgatttgctgaaatttttctcttttttgtttggtgtaaaactttatatgtcgtactttttgccttgtggtttttttgtatcttaggacaaaggtattcttaatccctttctttgtcttcttgaaagatgcaaccatgcagaaaatgcatacctcctgtaaattgtttcctgtcttttagtaaacctttgtttaaatgagtcatatgtttagcaattttaacattttaacttggctctaattaatgataatatagcgtgatttatggtcttctaaagaaatgtagacatagaaaatggagatagaggttaacatgtgaagaagagtttgtattttgggttagaaaattaaatattggcttatgtcagtaagattaggccttactatttgattgtacgagtttactttaaatttctaggctttcagggctttgtaaagataaattttattttaaaacagctttagatttgcagaaaaatggcaaagatagtgcagggagtttccatatacccctcacccactgccttttattaaagtcttatatgagtatgatacttttgttacaatgaatgaaccagtattggtacattattattatttaaagtccctattcattcatatatccttagttttacctaaggttctttttttctattccagggccccactcaggataccacattgcatttagttctcgtgtttcatttatctttgctatagaattttctcagattttccttgtttttcattaccttggcagttttgaggagtactgattaggtattttgtagaatgtctctcagttggaattttctgattgatttttcatgattagactgtagttagtgttttggggagagagaccacagagggtaatgtgccatttttccatcacactgtcaacatgactaaagatgttaaccttgatcacctgatcgaggtggatttggtcaggtttttccactataaatgtattatttttccttatttttattattttcatacctaccctttggaaggaagtcatgataaacaacccacacttaagagggtgttatactccatctccttgaaggcagagaatctacataaaatatttgcaattcttctccacagaagatttgcttattctccctcatttaattattcagcatttatgtatatcagtatggactcatggatatttattttatgcttaggttataatccactactgtcatactaatcgtgctgtgaaattgttccagctttggccattgggtactatttcttgtgtccctttgatacatccccacaattgtggtggttttgttttctgttttttgtttgttttgttttgatgcactttcatcctttctagcattacacaatacttgaggcttatcaacaatataactccttcctcatcatagattcagccatttctccaaggagcacacgttcctttcattggaaaatggtattaaaaaccaagatttgagcaataggtgtgttcattgtttttgggttgtcatttccttttggccttcttggctgacagagcaaggacatatatttgtgtataccaacctgtgtatgtacacatatctaacaatcaggaagcataaatagatagatgatagatagataagcattagttcatactgatattttcaaatctaactcattaccacatgggtcattctagcttcttcctcttgcttatctataatcttccactccaacagtgaaaaactaccatccatcatttgcttacttaattgttcaattccagtggtgctgttccatttatccttactgaagttgaaatacataaatataagctgaatttttctcaaacccttagaaaaattatttttcccccaaaatgttttttaccctgcaaactcttaagattttaaaatgtatttgtgtcccaaatgtttttctgtacataaaaattgatatagtcaactttatattgtttgcagttaacttgggacatggataatggaaattctcagataattccacaatttaagtttatctcttgctttcattatttctaatcagcatactctccatatgacaactatatctatgataagaaaattgacttctttacctataaatctctgtactttcttgacagacaccaaagaactacatgttgactgtatcttgctggtaacttaaggagaatagtaacttgtagtttccacctttagcaactggacattggccatactctgatttaccaagagagtccttgtaatcacaaaggaaagcagcgatttggcttcagatattaaagcaactttttttgacgtggctagatggttaggaacacactgaagaatagattttcagtaatgagccatactttcaatgaacgtcccaaggaaaacaattttaagatcttgcataaaatagttcatatgcctcaaatttgcatttaattcttacattaggttgaaagctcatgtagaaaacatgtaatgtaaaaattggagagcccaagaacacagtcatttccccttgggtgctaacaaaaatatactacccaacagtgcctttgtttgcagtctaatattttagaaggaaaaaaagaccccacaagcaaacatgttttttttttcttagtccagaaagaagaaatacagtgtgaacataatacttagggtagacaaaatggccaaaatagattaagttggcatcctttttagctgcagcttccttaaccttgtaccacaccctgacatcatcttcctacatggccacacctcatccccccatagccaaacattatttgcattcatcactcattcgtagatgccaaatcagacatggttcttgcccctatggagtttatgattaactggggaagacatgcattaatcaaattctctttctctctctctctcattctctcacacacacacacacacacacacacacacacacacacacacacacatgaaactgtgactggatcagatgctacgggagaaagacacacagggttcaaaaatctgtgaagggtttttttatctgttcagggaaaatcaggaatgtcttctctgaggatgagtagttcaggctgtgatttgcaggatcagtaagaattaaccaggaaaagaaggcaagagagagaaccttatgtggtgaatgaacaaatgtttaatataaaggcagcagaagagccagggtggaggcaggcacagaggtgggagataaggctctggtggccatgctaaagatccttacttcaccctgacagtgatggatcatcacaacatttccaagatcaagaatgcacttcccatctgtgtttcctctaaagtcaaaatatggcccatctttcaaaaggaaaattcaaatgttacccattcagtcttctaacactttcatttcctaatctaattagaaaagatcattctggctaagaggtggtatagtagtttaacccacccactcatatgcatgtgtttgtatttatatataaaattttattttcacatttctttttcctagtggcattagcaaaagcactcccagtttcattgagtctcttttaagttttgcttcccctctcctcctctcttcactatgctctgctgtcttggtgtctccccactactcatgtactctccctccatttctcaattctcatatgaggggaggtgccccagagggtgacgaaggacagtgtggcagaggacaggaggaagaaaacataggcacagctgcacttcagcattctgaagctgtaatcatcctgagcatctgtccagggacttccttgcccagttgctttgccatctgtacttgaagccaaggagcatcaggtgctttgcctttcctcaccaggcttacgccatagccttttcaccccactacccacacctcccagtgatgctgcaactatttctcctctgggctccatgcagtaactttctgggtttttttggttgttgttttagagcatttttgtagacagggttttactcagtcatccagactggagtacagtggtgcagttatggctcactgtagccttaacctcctgagctcaaggcatcctcccacttcagcctctcaagtaggtgggactacaggtgcaaaccaacatgcctggctcattttttatttttttgtaaatatagggtttttccatgttgcccaagttggttttgatctcccgggctcaagcgatcctcctggttcagcctcccaaaatgttgggattataggcattatccactgtgcctggcccagtaactttctaaatagtgtacaggcctccagtctcaccacctgtcccattctccttctctttccttctgcagagacctaagagccaagcggagcccatctccttcctacacattcttccagcctctttaggacctgatttcacaacctcatgtgccacaccccagctgcaccctcctggtggaaagtgttttgcagcttcttaaagatatcattctgcttcattcatcaacctttgtccatggtgttccttctgactagaatgtgtcccccaacccctttgcctggtgagaccctcctcttcctttgagacccatcagaaggcttgtctcttcttggaagcttctcaccccactccagtgctgcatccctagtttctgtgcatcccctgcaacctgtgcatcactttttcaaacatcgctcctcaagtagcattgtgcatgctgttttcttgcctttctcactcacacaaatgggagtttcctgggggccctttgtcatcaccacctgcctgactggatacactaacactcagcctacctgccacctacttggaaccttacaggtgtttctttgattaattaattaattcatgttttctcctcttctggtcagttcttccactttacctgtgcttgtttggatatgcagagctctagctggcgagagtgtccttctggctagattgtctcaccaaaaagagaatgggttttccccatccgggtgtctcttaattttttcttccactcgtgtttggacaaaattatttattgactggaaggaccacatggcaactcttcatggctttgaggccccttaatgagtgtccaagggagattctctctcacttccaagttcatggcagacatttacctacccagtcagcttgaactgagctcatagaagttttatttctggcttttgcggatcattttttatgctgttcctctcacctgaagctccctttctatctctccctagttggataatagtacacatattaaatgtgtaccttgtaccaagtatgctgagacctgcttataactaattttgcttgatcttcatgaatagtgttttgaaatagcatttttctatccctgcagataggaaaactagaaaacaaagaataagtaacttccccaagctcacatgacttgtaagtggcagagctgggatttgaacccaagcccctctgaagctaaagcctgtagagtacatgctcccttcctccacatcacactgcccctgcttgttcacactcaatgtgagaatccacttctcaagtttgtcttgcttattccaacctgttttgcaatgaatctctttcaacagctctatagttcctggcactcacttggcatccatcattttctatgttgtcatgtttggtatcttttcatgtatgtaatgtgcatctcttcttaggagtaagaccagaacttttctgctctgcagttttctccctgtgagggatggtgaaacttggtggctaagagcatggtttatacagacagacttcttaggtttatattctggctctcctctgtacttgctgtatcagctagggctgatgtcttcacttttttatgattccatttctacctctgtacaataaggcaaatatgaatacttacctcagagtgttgttgtgaagatggaatgaattaatggccataaagcacttacagctgtgtctggtacatagtgaccactcactaatggtcacttataattccttcacaacctgtaagggtcctttccacccaggtgatgtccctatgtctcaactgaatgactggttagggatatctttccatgggctactgtggctgcagataattgcattcttatttgagagttatgttaactagtgtgggcttttatttgcttctctctttctatcaatgagtcctgctgcttcaaccctgggttaactgaaatttgaaacctttttctactcaaattcctttgatgctgaaattcctctgcggtcacagctaagcactttgtgtggtaaccttctcttctgtcctcaggcctgctgagatcatctgctcagcagcatgtctgacacctgttgccacctcacccagccacttccttggtgacctggcaatgcccagaggggccctgccagcttggagccctgtggcaatgctgtttgattcagcaaactgatagccttctgacatcctttcttcattttagcagccaaatcacatgcaccttaatatttatcaatagctaagcaacaccggaaggaagtgagacagagcctctgggctagtcactatctctgattttacagaatggttaagccaggtgtaaaatatctcacaataacatgccctgttgtcctgaggattcaattccaccgagatataattaccatatgaggaagtgagaaatagggtttctttctaatacacagaaaatagaaaataagatgcttttcttggccactgttatcagtttcctgttaaggttctgctttgtttaaaacagtcctgttttgcttaaaaacaaactctaaggaatttttctaaaacatgactcaacctaactaggtatatatactgtactttaaagtgaacatatttgaaataattgtgagtgacaaagagacggaaaaacatagattttgaaactagcattattctaatgatttttatcccagtggtttatttggaaatgaatttccattcacaacatcttcatttgtcttctaattttcatgcaatttgaaagggttagtttccttacccacaggatcatcctggtcaaatctcaaaagattggctagggcattctgattttacaggcaaatttatattttgccgtttcaggaaataattccttcatggttatcttttataaagagcttatttgtataatatatacacatagtatatatcaaataaaagatctggtgttataaacataagaataagcaatttcccttttgtgataggaatatgaaattccttctggtagaggacgtttaagagcatgtccaaagaatggctaatcaatgaattctctcattttgtaaggagacacttagatgcatttctgaaaaaaacaaaacaaaacaaaacaaaacaaaaaacactttgggctttctctgtattcttcaagcatttctaaacatttattgacatatgcagtagagaaaaactggtatcaggaggaaggcagtaagtagccagcagtcacaaggtacaaagaataaaatgcatgcaaacatgtacagtattcactttcaggagttaatctacattttatttaatttttttttttttttttgacagcgtttcactcttgttgcccaggctggagtgcagtggtgcgatctcagctcactgcaacatctgcctcccgggttcaagcaattctccggcctcagcctcccaaatagctgggattacaggcatatgccaccatgcctggctaatttttttgaatttttagtagagacgggtttttgccatgttggtcaggctggtctcaaactcctgaccacaggtgatctgcctgcctcggctgcccaaagtgctggaattacaggcgtgagccaccatgcctggtcccttttaaaatattttaacactgagaccatattactgatgtactacttctttctaaaagtaattagaataaatgtacaccctcttctttaaactttgcatttttcaaatttccaaaaacaaaaactaattataagtaaatccataagcaaaacgctgttaattaccacttccaaaatctggaagcggtgacttgctttactaagacaagaaactttagacaggtgaatacttttaacaaggaacacacttaactttgtctaattgagcaaattacaaatcagagctagtagcttgttaattataagaatatctccattacttgaatacgtgtactagtcatggtaggcaaaataatactccaataacggacgaccccactgtggatctgagaaccccgcaggccagcagtctccatgtgattgccaaaagcaatgccgccatataaaccacaggtgtctaccttcaccatgacagaagaaagggttagagattccagaagtcacaattaaatgcttccaccccgaaaagtggatcatatttcattttccaaagcaatgcaactttgttaacctcaaagaggcagggaagtacaattttcctgtggggttggaagaagaaaactggaaattggtgaacagttttgaaatgtctgccataacttttaagtgaggaacttagtgttctcttactctgtcatgtttttaaatatctttttgattgaaatctttcaaggctttccagatccctgaagataaaatacaaactctccaacaagaccttttggccatcaggaacgcagcacctggctctctcactagtatcctctctctgtttgccatgtcccattaagactgtctccagaaacaatgaatttattgttgcctgtttcctgctagcttttccccgtatttacacagtttgctttatctgctgggattacccttccctgactatgctcaatctctatctcccttggcaattctcctccaggccccagacctgagaactggaccagtgctctgctctctcctctgagcttcaccacatcctgtgaaaacttgaacctaattcttactaggttttaatcaactgtttacctgtcttttctccccactaaagatgaaaagtcgcagagatagcggagaacaagaaccagatctcacagtcatggtgccaaaagagtatctaaccctgaattggagttcaatacatacttgttgaatgaatgagtgagtgaatgaatgaatgggttttttttgtgctttcatctacctgattggtagcatattcaggacagtatgtttttctcacctttttacatgctataagacataaaacagataatgcgtgtagtgggttcataataaaggtttaaataaactttacctacagttttatcactaggaatatatttctgatatctattacctttgaactttttatgccagattatgtttaaaaacatggtgtcactcgtaagccacatctgggactgattttcatggattgattaaactttacatttcttcggagtattcactgccaagcccctctggtgccatgtcctaaaccaaatatttcagaaacattgcaaaacaaggctgcccttgtgctttggaaacgctttcaaatgacatgccattcctttcaacttgaatctattaaagacttgaaattgtagcaatccattggactatatgtcaagaaactggtatttttaaagggtggcatgtttcttcatttatatgtaaattatttccatgtgctttggagagaaaaatggaaattttgtgaacgtacttagcccttaaagaatgtgattgatccttgatgatgtcgttccagacaacaacaaatacacaagaactctttttgagtgctgtaagaagcttctcaaaatttccagtataatcctaggaaaacatttttttttaatcttttctaatcaggaagtctttaaagtgtattttatcaaaatgttcagtattgtggaaacatactcatgagctattagctatagctgacttttgaggttataggtgaaaagttttcacatcaggaagtttcatgtagaacaaccagcgtcattcacgctcatatctgtggcttatatccaagagggccactggaggcttaggggctttgaagttaacagcatgaaacttctccaaaacaaacatttaatttttttctgttcgtttccttaaacaaagtccatgtaataaatgaaataattttgaagaacattgtaatgaatcccacataccagtgggtcccaaattactggaaatcataacatggctcatgtgaagaaagaattatactattttcaagctgttgtatgttaaactattatagtaagtagcataattggcatatattttaggccgtattttcaataaatcaatatttttgctcaaaaggcaaaatttaataatttaataatctcataaggtgaaggatggacaggtaccatgttaggaatttgacatgtgttgtttgctaatagactcatttaataaatgaagtaaatgatattaagcagtttcctcatgaccacagagcacagagccataatttgatttaaatatgagtatttctggctcatgctctttctctttctacctattgccattagtgaaggctgcatttagtttttttttcaagaagtgtctagcttacaattttgagcttcactacccccaacctcatacacacctcatgtggcttagagctatataaaatccatgttttttaaatacttctaaaattggacattcatattatgtgtatgatgttttacatatagtatgagtgcagtgaaagttagtttccttaagttttcctgaattcagctgttaccctagcatgactgcttcagcgaagagataagagcttctttgactttttccactggaatttttcatgccagaagaaattgaacatgtgagcctggtgtctggaagagtagcctggatttatggtatcagatgcacatttttaacaccttcagttttctctttaaaatatctcttcaatcccttacttttctctatttgtttcaacattaaaatatgttatttttcttcaaattgttggcattgacacctcttctacaattcccagtcatctgcatgctactgcttcagaggaatagtcttatatatagaaaatactttttttttctcagcacatttatatctaaacaagagaatgatatgcttttacccagttatctgcgtggctcacttccttcaaggcttcaccccaaagctacttcaatgtaacattttctatccattagattgagaactgcagttttaatccctaaccccactcccagactcccctgctaaagttttctctattgtccttgtcattttctgatataccttctaatttacctatttattttgtttaatattcatatcccttcgactggaatgtgaactccaacaaaagttcatatttattgtcttgttgtatctccatagctacagtagcacttaatatatagtagatgctcaggaaagatttataggaagaaaaaatgaaagcatggtttgcaataaatctaaatctataaacattccttttttagtagtattgttaaaccttacggttcctgtacaaccaggtgtatgccctctagagccaccaataatattccaatattaaatatacataattttataaacaggtgtgattttaatgtctctagacctttccaaccagaaaagctgaatccaggtactgctggtctttttccttccataggttctcattttccctgatgcagttattgccttttctgtttatactttcttccctttaggtgacttcacttacaaatataggaatgctgattcatgtttagcattgtgtggtttcagtatttattttctgtatttccacattgctattttagctcattctttaattaaataaaatgccttattctctcacagtatcagcaactaaaagaaggatacatcacctacagttgttagtgtgaactgcttatattaactcataggatatatattggtagacataaacctactgactaaattatttctgaagtatactctacaaaccatcattgtatttttacatttgacaaagtggaaaaaaaaaaacctggccacaatctttaaccctgcccagtgtctctggcttttaggcacacagccagtcggcaatggcggcaggggtggcatataaagattctagatctcaaaatgccaacctggccagaaaataaaactcactatgtgataccattggaacaagcttctataccaatgtagggggtgatggaggataatatacattgcaaatttatgtaaaaccagaccatgtggtatttccaatagttgttacaacattgcttaaaatgatataaatggccttatggataaaagtagaagtttaattttagaatagttcctattttaagactagatttagcaaaaatccttatggcatatgtttactcttggggaaccttgagagatagtgaacaagaaacgttagatcatagacttcttggctgcaaaaagtttatttatttcatcattttactcgtattccttttattatttgaaaagctttgtataaaggatttttagagatggcatttcattaaggttatatttattagaaaacaaacttgaataatttaaaattacaaaaggtaagtcattttatgtatttgcctacttgtttttgttttctccctgccaccctccctttcttcctttgtccttcccttcctcccttccatccttccatcctttctttattcatgccctgcctatttagaaaaggatttgcagtaagttacaaaaagtacaaagtcaataatttttttttaattcagaatgttaaaaagagaaaattgggtgaagagaaagtgaatatttcaataataagagtcatagtgcttcctctgaaggagcccagaaacccatctcatagttacgtggtggccaaacttagcaggaaaacaaaagaaatgctagacgagaagaacacaacatccatttctcaggaaagactaagttttcctcgtacagaaccctgaaatgtattctcccctgggatactgtttggataaacagtgagtgctgtaatagtcaatgtctttacccactgcttcacagcaaagcagaattcccaaggtaagaatgtgaccatgtaacctcattgcctcaccattgttctctccactctaatatttcagtactaaatgtgtgtgtctcttagggttgctgtgctgaataagtgagagtcacctggcacagcagacatctagtgtgtgctaaagaaatgtacagagaatgagagagaatttgaataaaaaatgtaaatagaatattatacagaagttaggaattaattcacaagtgtgtaagagatactctgtctcagatgtgcaggccactagtagtgcagtgtgacactcactgcctctcaagagaacttagtagtcagaaaagtgaagaaatgacatagcttttttacactatattatgtagaaagcttattttttaatgttaaccaagagcaaggtccataaactctaataccttccagaaagcacaaaagacattgagatacatttagagaaatagaggaaactgagctagatattcacgtgaaataggatcattccacatcttccagcaaataaattgaggtgaccaaggtcccagggagcacagatggtcatattctaatgaagctctggctcaaaaacacacaagctgaaaacaaggcgaggatgcttcataacaatgtccttttgtaggagaagtgaggattagtgatgagggtaggagtggagcaagagacagggattaatttgcatagccaccttggaatcccaaactgtcaatggtgtcagtgatgctgtttgcttgagtccctaaagggttgaatgaaagaagttaactagatacagagttcacagaaggtcaataatcttagctttccaacaagttggagatcggggtaaggagaagggcagaccttaagaaaagagttatacttattgccaggaaacagtgcttccttttgctgtttttccacaaacagatttacctttgccctatgcatttcatcttattttaaaaaacaaaacttttattttaggttcaggggtacatatggagattttttttaatataggtaagctcctgtcatgggggtttgttgtacagattatttcatcacccaggaactaagcctactacccaatagttattttctctggttgtctccctcataccaccctccaccctctggtaggccccagtatgctgatcctctttgtgtccatgtattttcattatttagctcccacttacaagtgagagcatacagtatttggttttgtgttcctgcgttagtttgctaaggataatgcctctagctccatccacgttttgcagaggacatgattgcatttttgtatgactgtatagcattccattatgtacctgtaccacattttctttatccaatctgccattgatgggcatttaggttgattccatgtctttgctatggtgaatagtgctacaacgaacatatgtgtgcatgtgcctttatggtagaattatttatattcctttgggtatatacccaggaatgggactgctgagttgaatggtagttctgtttttagccttttcagatgtcaccaagctgctttccacaatatttagtcttcttacacccccaacccccttggaagtttagaatggaagcacatttcttcagatgattattaactctttgctttttctgtttttactgcatcatttaaattatggtgtggaacatcgaaaagggccctaaagcctctattgtcaagtatgactgacctctcttggtaaagcgagacctagttctgactgagattcctccagtcgtttcatggttaactttccattcagtttcagttgtatttcattgtgtttcctgcccagtggagattcagcatagatgacacctaaggaaaaatgctagtcatagtgtgagaaatcatagccttctctttcaaatgcttttattcatattcctttggacttgattttagatattgctcgccaaatttagccatctttcttggtagacatttctgaaagtttagtgattaaaagcttagagtctagagttaaatggagtctagagttaaatagtctgggtgtggactctggcctggtcacttgccatctgtgggcaggccacttctttaagcctcaattttctcccctaaaaaatggagggggatgggggccatcatgatacttactttataaagtggttgtgaagattcaaggagaagttgatacatataaagttcttagaacagtgcctggcaggctgtaaacaactataaaaagttaatcattattttcagaaaaaaagttgagtcaaacctgaaacagtggtacaatgtcaagagcaggaactttgccttattaattgtgtcttcctaactctatggacttaggatctgagactctagttcctacaaactcatccatcctggggcctggcatatgggagctataaaccacatcagccctcctttgctctttttccttagggctgccctgaggaagaaagctaatgtgtataacatctagcattatgccaggtatgtggccagagctcaaaaaactatagctattattgtattatatactttgctctattttttatactcctggttaatgacggagagctctgtgaggggctgctagagggaaggttcaattattttagaagctttagttcttccacatttcactttgtaatgtttgccttgccttgtatttattaaacaatagtttactatactcgttcctaaaatattaagtatagcttattatgccctgttaatctttctcagtggcatacaataatttaaatatctgcttgaaaaatctcaccaagcattcattttaatgtggcttagaatgttatataatatgaaaaagtacgtgttctttcagaaattagttccaaagaactccctatatctagagacaggctgtgagaatggagaaagttgaggagtgtctctgttaggaatcttactactgcttttaaatttcatggaacacctattaaattgcttcgcagctaggttatgaggaaggggagccctgctcactcttttaaagttaaaagtgaaaagttacttgcgggtgattagggaaaaccatctcagaggagtggactgttggcatggagaccccacatataactcttgggggatggcaaaaacttgagagaggatgctttatttctcacctcctaaaatgcctttcccagctttctgtggtgagagagaatgagacagcagtcatacctaacagttggtgaaacagttctatgggagtgagggaaagtgaggggcctaggatgagtcagaaacatgtacatacggaaagggagagagacaatcctgattaaattgtgccttcttgcaaaaatatatatatttccacatttgatacaaagtgaagtatataaccttgacaaagcgatatctgtcagaaaaaaaattagaaaaattgctttaaataaacagtccttcaaaagatgtcaggcacagagactttctgagaaaatgtttccaaacttttaaggaacaaatagtatgttatataaattttctagagtttgtgaaaagaaaatcaacttttcaattcattctatcaagtagacctatttgcaataagaaggaagtccctcaaccaatcttacttttcggtagataaaatcttaaatacaacttggtaaattgaatcttgcattttgttaaaagattcatgctcatgtcaaataaggccgagtctgtaaatgtacatatagttaattttgatcaaatctggtcacagaatccatcatattaatatggtgaaagaaaaagcaatagacttgtattgacaggtgccacagtggcatttgactaaaacttaatatccatttgttgttagttttttttaaaaggatgcagtgaaatagcaacagaagaatatagtgtttatttcaatggtgaaaccaatttttaagtgtgagtcgtttctattaaagtcagcttagttataagcaataagacgtaacataatatttgtatgtaatatttgtttgggaagttgtatagttattgtcaagttattgttctagtacaacaacttgaaacataaaatataaaatgaaaactgactttatagctatgtgggtatttacctggaagagccaaaggaattagttgaaatgttattagaaatgattcagtaattcagataggtagccaaatacaaaattacatataagaaagctattagcttttttatagaaagtaataatcagttagatattataatgaaaaaaataaaatacctctttatttacttactttcttactgttgtccaggctggagtacaatggcacaatctcagctcactgcaaccttcacctcctaggctcaagcaattcttctgcttcagcctcttgagtagctaggtctacagacatccaccaccacccctggacagtttttcaaaaattttttgtagagatggggtcttgctgtgttccctaggctggtctcaaactcctgggctcaagcaatccgcctgtgttgacctctcaaggtgctgggattataggtgtgaaccactgtgcccggccaattctttttaaatagcacaagattctagtcacaaaaacatactacacctatatttatgagtgaaaataataagaaattagaagggtttttttggtattgttgtgaagaaaacaaaaatgtcttaactaatgctaaacaatccacaatattcattccactataggcaattccaatcacattttatttttgattttaataaagtatttcaaaaatcaagctaacatgggaaaatcaagaaaaagttgaaataaagcacagtgggtaaaggttggaaggatgtagaacacaccattccagagattatatcataaaaattacagtaacatatatcatgtaatatataatattgtaagaattaggacggtggctcaaatgaagaattagataaagttgatttggatagactatagatttcaaataagactcatttatgtatttgtgtgtgtgtgtgtgtgtgtgtgactgaagtagcattttattcaatgagaaaagggatgattattcaataaatggtgttgaaagcaacagctatcgtttgggaaaataatataaagttagattctttctttaaaccttatataaaaatatacattggatatatattttattaaatatttatttaaataaagatttcattaatatataatatataattttattaatgtaacaactaaaaagtagtttagttaaaattactaaaataaaataaaaatgagtatttaaatttcaacatagggaggatatttctaagcatatcactagagcgagaaagcatgaagaaaatgtctgatagatgtgtatacattaaggaatcaaatttttctacacatcaaaaacaccataaagaaaacgtaaaggcaaatgaaaagggtgggattctatttccagtgttactaaagagacattgactttaatgtcttaaaaatccttagaaatcgtccaggtggggtggctcacgcctataatcccagcactttgggaggctggggcaggtggatcacgaggtcaggagtttgagaccagcctgaccaacatggtgaaaccccgtctctactaaaaaatacaaaaattagccaggtgtggtggcacgtgcctgtaatcccagctacttaggaggctgagataggagaatctcttgaacctggtaggcggaggttgcagtaagctgagtcatgccactgcacttcagcctgggcgacagagtgagactctgtctcaaaaaaaaaaaaattcttagaaattaataaggaaaaaaatgacctttcttccaggaaaatgaacacaatccataagaaacacaattggtgagttacatgaataaaaccccaactttaaagaaatacaaattaaacaatagtgaactaacattttctctaaagagtattcaagattaaaaaacaaagtcaaaactagatgataacaaattcagcgtattgactaaagtcaggacattcttattcattagcaatgaaagtgaaagtttgagtagctttctagaagagaattcaagtcacactatgaaccaacaattttactttgaagaatttatcctaagaaaaaaattaagaatatgtgaaaagatttagttacatcaatgtttattatagtggaaaactgaaaatgtgccaagaaaaaaaatgagccaaatattcagcagcgggaattagcacaatataccttgatatgttatcaaggtaaatgtgtatgataggatactgatgcataaggataatttttaacatggtagattttcattatgttaaatgaaaaaataaaaaatacataaaatgagagcccatttttataataaaaaatatatagtcattcaaggaaaacatgtagacggacatcacaaaataccaacaacaggtatggttcaaagtgttataggtggttttcagcacatagattacccctagcaaagagacctctgtgacacttcgtttcttcatctgtgaaataaaggaatcatactagattagttctaaatgcttttagcaaaaatatttcataattctatgagtattgatggttaataaccttgagaaaattgttattatttattgaactttggagttagtagagtaaaaccaagtttatcctgagctatcccttgttttagttaaaattagttaaatttaacatcctgatgtttatttataaattgtgcatgtgtacatgtgtgtgtttgtgtgtatatatatagcgctttctcacaaatgcctgttttgctgtggagtgggttgggtgggtacagagtttcactgaaatgtatattcccctatagaattcttagagacacaaatatatcttgttaataggttatatatattttcatgtttcatctaccatttgaaaccctataaccatttgaaatcattcttggttttggtaggtttctttaattaacattcacattgagaaactataagagattcaacccttgaaaaagtccttttgctaaagagatttgcatgtgctctaaaaattggtggaaaatggttctgctctaatcaaacgaatgtcactctactcttatttctagctaacagtaaaactgcctggaaaatgataacgtacaacaaatatctcaagtggttatttagtaccttgttgtgatagtgaatgaaaaacacactcagttcactcagttttaatttgctgttgaacacttaacatttcacagtggctggctgtttggaggccatatacaatggtagaaaaagtagctttctaaaagtgctttgcctcattcttgcttaacctggcagacgtcatgaacttccaagagggaacatattttatttgccttataccaccagaggacttggccaattattgctatttatttaatgttggtgttgacatagtgcctttgccctgaggagctccaggtgctttataaaattagtcagcaattcacctcacagcctttacgccagagagtgaacattgaaaataataatgattcgtggaacctacagccacccctaactcctatttctgtttgcccagtgaaacagaacaaatatgcccagttccctcagagagctagcagaaaaaagttctagtggggtgtcatgggagtttctctcttgtgtaactaggtgaactcctgtaaggaaaatttgccatgcaccctgcagagctgagacttactattctctgttgtaggacccatactttccccagtaaggaactccattttttttcaggcctttgctcaaatatcactttcttaataagacctttcatgaccatctgtttttaaaaacaactaatcaaaacctatcctcaagtgcagactttctgtatcctcattcctgcattatttttctctgtagcacatgtagctattcagcacacttagatttttatttatttattaattaagggttgactccatcccaccagatcgtaagctttatgaaggtagaacatttgtctattctgttgagttatgaatctttagaacctaggtgggtgcctggtacctaatgggtgtgaaataagcatttgttgaatgaatgagcgaaggaatgaatgaataaataaattttccccagtggagcaacaagcaacagttggagtcccttgttgtcaatcaaatataaagatagcaaagagtaagtaagcaagagtgaacttgcatcatatcaagatttcttttatattccttaacattgaaaatattcatgtggtgaaatacagtattagagttttctcctttagttgcaaataatagaaactgaatttaagccgacttaaacaaaatagcagtttgcaggatcttgaaactcaaaaattcaaaggatacagctagttttaatggttgtgaggattgctgcaggccctctcatgatttgattgagcgtttgtctctgtctttctctttctctccttctgtctcactgtgtttctaagactttctctatgtggtagcaaagaaagctcagacagcacaaggctgcctgtagtaattcttgtgacatgagagcatacatctcccagtagttccaaggaaaacccagggctgacttgaaacgtgtgcacttggattacaggtcaaccttgagtcaattgtgactgactgaccaggcctctgtgtgtcccggttgtggaggtcagttccatcagtaggagggggattaatcaaaggaaaatcagaattctttatcagaataagaggagaagatgcatgacaagtattcagagatacactgtaaccagaaaaaatggtcatatgtgaagagtatctcattacaacagggaggaatgtagttctaagtcttttaaagttctgctttcctataatatcagatgaccacatatttcacagcataattgtgaaaatgatattttgaaaggaaaaaggaattcttatctgagataaaactgtcaaaaaagtcaaaatttggctgtgaaaaaagtgaacgtttacttgaggttgtcattacttatttccttcttatataattcatataattctatattattatgacattcatataggcaaggtgttaaattctaatttgattttataatttttcaaaagagacttagaatgtgctagaaatcctaaaaatttctgttccaactattggtatttgaattatgtatatactgcccctttttttcctataaaaaactgatagaagttcatagataaataaaattcacagataatgttacaaatttatttcaaatgttacttcttgcctttttctatgccaagatacttaacaaatacttcaaaattgaaagtatttttactccttattttatctattccacagaatagttagaggtagaggaagaattagataatatatttattaataagtcaacatcctattaatggatgaacatagaaccaactcataggcaacacagtcagaaaatcaaggtgtggcttggttggcatgaaagcataatgcccacaagaactactgttgttggttatgctgtactgtatgagaagggcatttctgacgttagctttgatactagccttttagtaactgagtaaagttagtgagtatactcacccagttcagattattaattcagtactaactcagtaatttggtgttactacatactgagatatccagctggattcaggatttgctcaattcaattagcaaatccagtgttaaggggaaaaagaagctttgtgggtaagcatttctaaattggtgtttttatgaagccacaatattctggtagttcgtcttttccttcagttctctgaagttgtaatcatttctaaattgttgctttctaggtaaaagatgtgagataggggaaaggaaggctttcttaggaattttttttctttcattgcccagttaaattggatttgtgatttatatccattcatcctattcatacccatcatatatctgtatacatctgtcatatatccatcctgttcatatccaatccaattcataagacttttccatatttttcgtgagattagatttttttagtgggtgagaagaaataaaaggcacataatattaacatgctcctggcattccagcaacgaataatgccatagcaattttataaagattaaaaataccctagctcactatgattttgatgagcgcaacgcacttttggctttgtgggtcccctcctcataaaaaatacaaaattatattttgtagctgcatttatgtaaagataaatataatctaaactgttttgtactcattttttcagattttaaaagagatttaacatttctatgagctcctaaaattatgagctctaggaatagtgcttactgtgctattggataaactaagctggcattgtcatagctaaattggttacattttaagctgtgaatgaaagggaatttggtaaaccaaacaactgttgtatgcttattgttcattccagtataaatatatttttgctattaacattagttattacaagtggaatacgaaggggtggactcagggtttggaaagagagttaatgcaagtgagtatttgactccatcaacaaaactttacaagtaaaatcctcaggttttgtgcctgtaatctttttacaggatttaatgctattttacttcgtcaacaatttttttttcttcaaagatttgtatttttaaatgactgatgctatgaaagaaaataccctcatgattatatttatattgtgaatttttacagtaggggcaaactagaatttttcatgcggagagcactttgggttttactcaatatagctcttcaaagttcttcaaagttcaaagtaaaaattgatgctagagtaattttcctgtaatctaggtgaaaagcccacatatcatttaacaaagtaaatgctcattcatatttaatacaaactcttttttcttctgttgaagctgacttttatccaatttttagtttccagttatctatggttttgggaaacagagctaatttggattcatgaattctgtaaacaagtatttcttgagaagctcctggttgtgaactacctagaatgaaactgggtaaactaatatcaacatccattcttttgccaaacatcactgataaactgcaacatttttttttttacgtgagtggtcttggaatcagacatttctgcattgaaaacccagcactgttgctgactggctgcatggcctgcatctacttctcacatttctgactgcctaccaggttccaggcactgttctaggcactgaagatgaaaagatgaataatatggagttcccatcttcaaagaagttacaattttaaggaagactggcaaataaaagttaccccacaaaataataaaaatacaggggtaaaactagggcatagttatattttggctggtctctttacctctgaggttcttttgctttttatgtaattggattttaacctcagaagactgtaaggttaaagatgataatgtataaaatcagtactctgagtaatgatcaaaattttctgttgccatccacacatttgagtgagatgtagtgagtgctagaaaataaagcagttcgtatcaaaaagggtgtgttgaaagaaataaactaatccttgagaaacactgtcatgcaatctcatatctagaaattgtgcctatgttctgtctataaattgatgaattggcagggtgttacatttaggacacacattgacactacatatgacatttgtaaaaacacttgctaattcagctaacagctcgcttctccccttctccccactactcactgtggagagagcttccagctaatagcttagaatctcccagactaaccaaccattgatggaaccaggtgctatgtgattgtaggaatttatttgttgctctgaatgttaactaaaagtaatgggcttcttattttgtccttttccttttgtgttatagacggcaaagactgtttctcatcagtctcatatagctaaattagatttatctctcatgctgactgattaaaagggttaaattctgggcacgttgtcccctgagtcctctgaaatccatgtcagaatagaagtgctcattaccagactcgatgaggagctccttttccagaacttctctctgctacactctaaggaccaagcacctctgcctaaattccaagcaaccatggcctgtggcagtcttggaacttttgccctctggcatgggtagaactagcgtcaattgggtaattcaatccctgagttccttcttcaatgaatgagagaatccaggaatgtgttgccagttgccttttccttgtacctagttttccttgctgcagaatgatgacagtctatttccacacctcccctcctgccactacaggatttatggtctgcatgccccagttgtgaagctggcatgtagcattttgttgccacaggcctgtgagtgtttagaagtttgtgtttgtatttccagggctacagtttgaatattgaaggaacaaacagcaaacaattcagaggtcaagctgtgactgcttcctcatttggagagcttattttatgtctgtatattctatactcagattcccacataacttgttttttccaccttcattgctttggttagatgctttcaagtgcattttttctctaagaaatctccatagaagagttgtttacttgaagtgatgggtgagcaaagtttgcctgacgtggaacctcagtaactttcccctaaggaaaagttctggcgtgtaggggtgggcgctcttccatccagacggatgggaacatagccaagcagccaggagacacattgacttgtgaccactgggaaggatgcctagccagaaaagtcccagcagctgggtctgttaatcttttctgaatgaaccagcaggcagttgacctctctaaacctgtcctggattcctttatatctttgtagtcacctttttaccccctcaagaattcccctataaagttgttcttaataagactctttttgcccacttccccctgaccttctgagttgaatatgaatttcactaattggtgaaagaaaccaccatgaccttgataaagccatttctactctggttcctcccttctaagaatttgttcattcaagcaagtatttgagtctaaatggatccacttggacattttaataattatcatgaacctcagtatccttaaagtgtggctaaaacaggctcaaaaaattcagatagtgtaatctactttctctctccctcctccagatttaagtggattaattcacttcactatgccagcacctgagtacagaataatttatttctgtgtcgtttcatgatgaaagtccagctggcattagctcaaattatgcagctggctattaattgaagaaaacttccctgtcactcctcagtcaaacatgatctgattcagcagatccttttcactctcatctcttctattctaccagtagaataaatgtaaataactttcacttggctctgcttgtcatggattgtaaattacctggcagcatgcagactgaccacattactgttttggaggcggcttgtttcagttgattagtatttctagaagagttttgcacatttcatctctgaggcctgaatgatgtccactagcaggaaatattgtagtctgccttttttcttacatactgtatactaaatttcaatctaatttcaacaagatgtcaaattctagcacctgtagggcaggtgttggtcttctatgaattgattatatgtttttctatcatactggatggtgtacaagcccaggttgtattttaaatagaatttcaagagagagatttgttctggaatttagaaatatatattatgtgccaaaattatttgatgagtgcattttgtaattcttaaaatacaaaactacttggcatgaagagatgctatagtatgttaacaattgtggaactttttcataagatgaaattctgtgcagaaatgagggagcagaattcttgtgggagtgctaaaatggttcatcaatttgatcctcacagcatatgagaattcaccaattatattactctctgaaaatatgtttcagtatcaagggcctctttttgcccttcctccatcccaatgtctgtactctctgtacagtgtgatcactgggtgctgcatgaccagtcattattatacgctcagccctgaaaatgaacttaagatggtaaaatcataccttgccaggatttgggtggctgtgagggattcagtaggattttagcaacagggactggaaaagaaatcagaacttggcagagaaaaaaatagcactaggatactagaagagacctgggagaactagcttgaccttagaggctggtcttgtgagtcatttgagaaatagtatcaaaagggcataagagggcccggcatagattaggctatttggggttacaggagatccaaagctagaaggggcaacaaaacattgtggtatgaggccatcctaatttgaacatcaggcacaggatctagtgtccatgaagtagatctcagggaatgggcagcctgagaagaagagtagatcatgcagaagccagcagtcacccctagatccagatctgagtgtcatgacctagatgcaattaaaatccttataatgggtcccaccctggcaggattctttcaggaactcaggctgagcctgaagtgagtagattcagctgaagggaaggtaaagaactataagttgatagacttgcaaaatggagaggctgcttttaggaaaccattgataatagtatcaatcccattgataatatatgtgattgcccttttataaggccatgtgctttctgcacaattatgataaagtatttagccaaacttgtattccctatataaagggggaggagatagtatcccatggggaattccttcccatattataaactggtagacaacttaagcaaaaatgtttttactcatatgaacactgttgaagtataaagccaggtatttaagtcatgataggtgtttatttactttgaacatttgccagaagtttgatgatgggtatatttgtagactgggtgttagaggttgttatattctaaaaagatatcttctgattaattttcttcatttataaaaacaatctattttgataacatttaatttatgaactttggtgtcatgttacactttatacattttggttgtacattccctgtaatgcttacagagacagccagtcaggcaataattgctacatactgagcgccttctattttctgagtactattgtaaattatagagataaagcagtgaaccagacagagtctccatcctaaaagagcctagtagaggatgggaactgatgtagtatcttgtaattgtcacagcatggtacacttgcttcttcagatgccattattaagggcgtcgtttctttaaattctgagatccctaactcagcttatgccagaactgatgagaattagaccttcctaaggtcttctttcttcctaaaatgaatattgaaataaatctataagataaaaataatcctaccaccaagccccaattaagactggatttttaacttgctcttctcagcacaatgacacaacagaggacacagaggttaatggaatgtctttggagcaaaggagatttcaaaaccaccagtttgttagatttgatgatcagctctgcaaaatgtttaaagaagatttcttactcatatcttataagttaagactataaatggtttaaatgggggaggatgtgacaggattgaaaatcttccccttcctttgtggctatgagaattcacactgagcaacagggaagagaaggaactagaacttggaatgagcctgtgtgtgggccctcattgttccaggatttacaaagggctacgctgtcatcatattaaataaatggctcctgctccttgtgccagcttaattgccaccttggctcccgaacaaagaaatcacaattgaggcaaaacatgttttgctattgaaggcaaaacctccttagagcaattttggggttgtttttccatttaattttttaacttgcagaaatagccctctttttttctgttttttggttttttttgttttcgtttttttaaatgatgtacacttgtgctgttaagtttcagcatggaatacaggctttatgtatttaggcagtaatgctgagttagatattggtaccaaaaaaaatgaaagaaagagagcaagaggacagcacatgtcaaaatgcctgatagaactgcatggacagaactaaatgtgcttccctactgttagttacacgtataagtcacatctcaaagcgtgttccccaggttagcatcaatatcacctaggaacttgctggagatgcaaattatctggttccatctcaggcctaatgaatcagaaactctaggtggaagggagcagtccagcaacctgcattttacaaagacctccaggacactctgatgtatgctagagtctgagatccactggtgcaaagaataccataggacagatgtacactaactaaactagttctgtttctcttaaaatgactttgacaatatttagaattttgaagaatggtatagaaattcatagttcgtgtgtgtgtgtttgtgtatgtatgtgtctgtgtgtgtgtgttttagcagaattctattttagaaaatatggggtagacttttatttagttttgttatttttgttatttttgaaaaattaagaggtaagcagagaagtatagccagctacttccataattttgtaggaataatgaagtttattctagcagaaagttatatcttatggaataacttctctaatattctctctagacatatattcttttttgaggcaggaacacaaaagaaaattggcttcttcatcaagttcaaagaaatggtgttttaattatgtagagaagtaatttcattttctcagagaaatgggtagacagatattagtaatttaactctcttcttaagtaatggctgctatagctcttaccaacactgaaagaagtagagtcaaatagatttaaatctggctagtgattagaattttttggggggtagggtgggtgaaactgtattgcagggaggtacgttgtaataagacagctagttattatgcactaccctccagttctttgacatgatagctaagggcatagacaaaaatctgaactctgtggtctttgtacatatctgcattcagattaattcacttaacaaatatttgtggagcacctaccatgggcttatcactataatgggctaaggttgtacagtgagcaagatactcacatatgtgattcttgtgaagccagaggtccagtggtaaagctagatgagtaaacatcaattacaatgaagtataatcacttccaggatgaggcagaatataggatgttatgcaagcagtcatccttgattttaggactgggtgatgtggagttcatgaatggttcatggaagaggcactaaagcctacagtgtgaatagaaattagcaagatgatggacagggcaggcagagacaagagcatatgcaaagttggaaagtggagagttcttgacattaccacattactgaatgtgcatatggtggagtttagggtgcagagaggacagttgcacatgctctggagaatgatgggagatgaagctgagaataatacaaggaagagaaaataacaggccttgctatccatgttaagaattccggacttcattccaacaaaagggaaagtctttgaggttgtagtatttggctgtgctgtagagagtgtattggggaaggacagtgctgaaggaaaggagaccagctgggacattgctgcaataattcagaccggtactcatggcttggaccagcagcaaggggagaatgaaaagtaaagagatttaggaaatagctacttaggaaatagattgaacgggaactggcattcaatatgtgtgacagcgaggaacaggaagacacttgggacaactagaagaacagtaggccattcactgagtttggggtccagcaagaggagtgagtttgagggtgaaattatgtgttccatttgggctagtagggtctgagaagtctgtggttgtccaagtagagatgtccaataaactgtggaaaatgcaatcccttaggcctctttattctcataaatacttctcatgctttttcacagcagaggctaaagccaaaaaacttttacagttgttgattactcccatagtgattgggccactactctcgatgtcagttttaagtgttatgtgaattttagcgttgcagaattttagcattgcagaatttttctgcacaaaatcctagaaagcaacttagtttactcagtgaaacctgcctgccaactaacaagacctattatttttcagttgggattttacttcaacagtggaaactatgacacaacagggatggtctaaccccaatttgagcactctgttctcattttcattaggaatcacttccctgtaatcataaaatggaaatatatttactgtagacatgttgtttggtgaaagcaacactaaaaatgagtagatgaatataacagctacaggataaaataagagttcccatttttaaaaagaaggactatgtttacaacacagctctccttaatgttatagtgttattatagcagtgaattttcaaataaaatatttaaattggaatgttagaagttttcttctatcatatcaaataagtggaaggccacctgtttgatgattacatattcaagtgatagttctcaaaaactaaagaaaaatctcatataaattataaatgattctgcaaagtttcacctaacattttctccatacttatgaagcttctgaagttattttacttttgagaagccacagacagaaaaattaatataaatgagataaatttcaactagccttgagaataaagagagcaaggatagtcatcaacacaattaagaatgrccaaatcctattaatgttttcaaattaccaaattagaaaagttaggaagcatgaataatttatttctgacaacatattctttttaatatctgcattactttggtckgctaaggagataaacctactcatgtgacataccatatgtaaacattttcctaattaataactggaaagcttctatgtgaaatacaaactttctgctcatacataatgtagactacaggcagacagttaagagttggtcaaagctgtcaaagcttgttttatggaaatctcatcttcttttcctgtgctctttatcctagtccaggtcctctgaattcttttactctacagtacttagctaatacagtgtttatcctcacattctatcatagcttttatattaaccactcagcaaaatatgtgtgcatgcacatacacgcacaaccatacctatatttaatcatctagtaaactatattaaatcttctgtaaacttcagataagcctgtttaaattgggggtgggtcgtattgtagcataccaaatggttcatataccaagtatatatttgtcatactatgtggaacagtattatatttaaaactgaagtcttatttcatgtaggttgtaccaaatttgtggtggtaaacattgtatttaggtcattcacaaagagtacagaaatacagattagccatatttttctatagtgccattcagtgtaataggtacacaatacatctcatattaaagaaaaaagagtcttttcaaaagcctgtaagggtctgaataaaggtcttagaaatgtgtcataacagctgaaatctaagagatttggaaaaagtgggagaagttaaatattgcaaatgcatagagctaagacttcttcattgaaagttgggtagttccaacattcatgtggaaaatctttaaaagtagccaaaaggtaattttttttttttttttttttttttttttttttgaggctgagtcttgctctgttgcccaggctggagtgcagtggcatgatctcggctcactgcaagctcygcctcccgggttcacgccattctcttgcctcagcctcccgagtagctgggactacaggtgcctgccaccacgcctggctaattttttgtatttttagtagagacagggtttcatcgtgttagccaggatggtctcaatctcctgaccttgtgattcacccatctcggcctcccaaagtgctgggattacaggcgtgagccaccatgcctggcccaaaagctaattttttaaattttccagatagaacttcatgtgtatttgatatattccattttcgtgtatccaatattaccaaatccatggtatttttattctttgttttagatattctaatcatttcacagcactttcattacacatctgcccagatttcctgttgctaaatttcagacactattctttaagtcttggaagagatcaactttttcagcacaacccatcccaaacaatgtaatgttactgtgctatattaagacaacacatgtgctgatctttttcaggcatttccagaatttttattgaatgtcaagtatgtgcaaggcaaagtccatctagcgattttaggatttccaggacctgccatttataaacttcctggaagaaaaattaaccccctcaaaatgggtgttgacatccagtttgcctttatagctcctctgatgccttttaaaaactatatttacccatcttatgtcaataaaaaggatgtatttattataagttgtggcagatagtgttttatagacaattttatagcccacgtgttaaaggtaaaagcaaagaaattatgctactttgctgtattttcccagtgatttatgtaagtatttattccctgtaggaaaaagttgaaacactattgttgacaacagggcccaaataggtatcagcttgatgtactttatcacatattatctttttgtttttgcatcatccctaggaggtaaatatgtaacactttggtttcattagcatcacaacagattattaggcaaatcaacagaatgaaattaaagttatattatctaattgaaaaaagccttcacttatattttcaagcattagttcttatccactttcaatcacctggggaactttaaaaaatctgatgcctgggccagacacccagaaaaatgacatcagactttctggggacaggacccaggtgactgtatttttctaaatgtctttcatgactccgctgctttagaggttcacagacttccacttaaagaactgctggttaagaaatgcatccctacttgctcggactcccagggatatcacttttcacctgttcctatcatttagaaaaaaatgatttgaatcagctagatacatgatagaggaccccccccccacacacacacacacaccaatctaagcacaaaattatcttgttgtcctcaatagtttgcatggataagtaatgcagaataagcatcatacccaatattaataaatacttaacaagaagcccaagattttaccttgtttcctattttttccttcagccatcacattcaaacctggcccaaaggtttctcacattctggcctccatcaccaccactactgctttggcctggccttttgtcaagctagaaattgccagaatttcctgacaacaggctctgtaagattcagtttagagcttacactttggctggagttcatcttcctaaaaagagactgtgatatgtaaatccacaacctgaaatctcattggctctccattgcctaccaataacccaaaatcctctactcaggaagtcctggatggtgtaactccattgcacacaggttcatcccacaaggcctcttggtaatggggtactttcatgtgcatactattctgctgctcttgtggaaagagtcttcaaccccattctgtataccctggacactcacctgagacccagctgaaacagaccttgtcatctcggaccctgcccttggttctgttgaaagaattagccaccagatccttgaggctgtctcaggacttttgcttcacctttattataacaattggaatgcaggcaaaatagtgtttccagttactaaaataaaactatagaccatacaatatgtttgttttgtgcttatttaactcgcaggggaaaatacccatatttttaagactctggatttaaaaaatctggttgattatatgagaatattgttggcttgtctgtttgattttgctttttttgggttgccaataaaattttagagcaagaaaatcaatctctggaaaatatgtctaaaatgcaagagaaaattccaagaaaataagctagatttcaattaacatgtgaaaagcatttcttaatatatacaatgtttattttacatggataatttatgtaagttattgaataaataatacttttaggtttgggttttaggggaggttttaggtttgggttgcagcagaggctttttcagctgattcaaatatctagttttcaaaatactctgcccacatgatttttagatatgacttagccttaattgctgactcagattttcaccttttaaaaagcaattgtgctttttcatatacactatcaaacaagattataagatattttaaggtaagaaagtaaaagggcatccactaatgatcatcagaatcacctggaagggccaataagccacacattaccaggccccttccccaaaatttctaattctgtagatctgtggtacagcctccaattttttgcttctaataagaccccaagtgacactaatgctgctagtctggagaccacactttgagaatcactgcattaaattaacaattttattggttgagttttcaccacagtgtgcatatctgttgactaacaatgaatagctttgttgtcgccaaacactgtaatgtttccaaatatccatatgtagtcacaggcccagagaaacaaaccacatctatattaagactgttttgttgttgtttgacccccccaccctttagtgttttaattacatcaatcctggagaaaaataactgttttctaatttgggcattacagatttgctaaggcaatagaaaattctatcttaaacctttagatttttagtcttctagtaaatataagcatatgagttccaagcaaattctgagttttaaaaaatttaataaaattgacaaatgttttcaataaaattggagaggcccatttccttgtacaaatattctaaaaatagatgataaaagttctaagtgccattttttgaaagatcagcaaaataattctacaagtatttgtgggcatgttatcttttctatgatactggttataaacttaagttatatgaagacagtgtgttagttaaattatgttctagtcctaccttaaggaaataaaaacaataaggctcttagggcctttcttctgcaccactgcagtacttgctaacatgttttaataacatgtagctgagaatgataaactctaggcagcagggtggcttggagatactaatggaaatgcccagtcaaaaagagcctggactagactgaggtctgaagactccaaataactttctgttatcccaccatcttctcagatggtccaatcatgctacactcagtctagggcaatgaccctgaggaatggtatgtttggcaaaaaagaaaccaaagaaggctactgccatgctttaagattttcccatatatctttttcagcatcttgaatggggtttctgaaagtctgaggagtgaactgtgaccaaaatggctgatattttgagctcaaagaaacttaaatttttaggtaaggatactaagaccgacttaaaaagtatagtatcaataatttacatttctttagctaagaattttcagaccacttcagtgcagatcacattgactgattctctaaaccactctatgaagtgggcaaagtgatggtctcatttttcaaatgaggactaaggtttatttaattcaagtgattaactcttcaaacatctagtagaggctagccagatgcattggctcacatctgtaatctcaacactttgggaggctgaggcaggcagatcccctgaggtcaggagttcaagaccagcctggccaacatggtgaaaacccatctctactaaaaatacagaaattagctgggcatggtggtggcaggtgcctgtaatcccagctactcaggaggctgaggcaggagaatggcttgaacccaggaggcagaggttacagtgtgctgagataacgccacggcactctagcctgggtgagagtgatattccatctcaaaaatcaaaacaaaaaaatctagtaagggtctatgtctagcgcctgcacttcaaatatgtgtttgtcatgacatcattagcccaatccaattttctttcattaattttctgaaataaatattttttgagtttatactatataccaggtgctgctgtaagtgctaggaatataacagtgaatcaaacaaataaaaatctgtgaccttttggagcttacattccaatgaatataggcaaaataatagcccctgcaaagagctccactgcctaatccctggactaaatgaacattacctcacatgcaaaaaaagattttgcagatttgattaggggcacagaccttgagatgtagtgtccgtattagcccagtgggcccaatctaatcacacaagtccttctaagcaaagacttttccctggttaggttagagagagatgtgataacagaaaaagggtcagacagatgcaactttgttggctttggaaatgaaagaagggggcctggagccaaggaatgtggacagctagaaagggcaaggaagcagattctcccttagcccactcagaaaggaatgcaaccctgaagacaccttgattttagcccattgaggcctgtgttggacttctgacctacagaactataaaatgatacattttaattgttaaatcactaagtttctgataatttgttacaccagcagcagaaaactacagaaaagatagacaatattcaagaaaaataagtaaaaaatatatgttggatagtgataagtgctaaggaaaaaagtcagggaatgacataggaagttatcagtagggatgcaattttgaatagggtagccctccaggttaacatttgcatagactcaaaggagatgaagggcaagaacatttcagatgaaggaaacaggaggctaaaagctgagactaggacaatgatcagcctgactagattctgaatatcaccattaaaagagcagtttctacttcagaatatatgtacaagcttcacctgggaaccatgtgtgatgatttaggatgaagtttcaaaactccacagatgacattcttatttttctataagcaaacagtcttgcccaaataacatcatttactttttcatgtttgctggagagttcattaagaaattcaatacaccgtattcaaagaagatgaattcttacaatcacttagaatttggtctaaggcaaacaattgaggatgttcagactgagtctttttggaccatctactcaacatcattatcaaccaacagcttataccccttcaaagggatctcaaattatatttgatcctgagttgttgctataataaatttagagctggagaaaaatagtcattgtaattattttgttattagagaccggcttacatatgctaaataaataaaaacaaaatgagagttaattctatgtgaaattcaccatcaattttgatgaaatttcctattgatacttccaagtacagtaggcctttcgtatccatgggttccacatctgtgtattcaatccaatttttttttttaataatatggttgtgtatatactgaacatgtacagacttttcttgtcattccctaaacagtacagcataataactattgacataacatttacattgtattaggtataagtaatctggagatgctttaaagtatattgatgtgtgtaggttatatacaaatactatgtcattttatataaggaacttgagcatccatggattttggtatctgcctgaagacctggaaccaatccccaaagatcctgagggaccactgtaatctaattgaggccaagtttcatgggtttgtatcctcttaagtacctgggggaaaaaactgtctgatttttttttaagttttagtataccatatattttaattttcaaagaaaggaaaacagaaattttatgatctgtgtcaatagaagtgttaatatataaagcaaagaaatgcctaggtgaatattggcctagtaataaacattctgcaatggtgcttcatgggaaatacgccttaccttgctactcaaaatgtgatccatgaaccagcagtatgaatatcacctggacttggtagaaattcttggaccccaccctgacctagtgggtaaccatctgcattgcagtaagatcccaggtgattcatatgtgttttcaatgtgagaagcacagcactggggccttacccggggccctccttaggaaacacaccaagtattgcatgttttttacatcctgacaggtccatatgaactcacatttttccgaatacagtgcactagcatatctatcatattttgaaaagctattttcatcaagggagcttagtatctggtgctcacgagatacctacagagaagtagacagtgttatgcttttgagaatttatcaaaccttttggtcatataatgtttttatttcaaaaccttaaattggtcaacatatttttaaatatttaatagttgagggatgaagaggatagaagtttaattagttcaaaggaaggtaaattgggaaggaaacaaacttttttgttgaatcagaattttcaggatgaaaaaagacaccagtgccctgtggttcagtgctaacacagctatgatgtgactcttcaaaggtcaatgcttgtgcccctattgctgcacatccttctccttgtcagtgttgatgtgtcattggctggctctgtgtcattggcttggtcttgctttcactgaactttggcctccgtgaaacttctaagtagcattgctcctacctgtgaatcttggaaacacacagggcaagtgaaattccattttcttcctttctttctttttttaatgattaatagacaatttatttaagcaagatccttatagtcatcrttgccagacttaatatgagatgttaaatgttccatccaattttccttcctggataagtttttctttcctatccctgtcagttttgaaaacataataccagaagaagaggggcccaattccacacagagctcccaagagtgagttttaggagtgagtctgaaattagaatagacatttgctgatcttgcataggtccaacgaattaaggcaagatcttcgatgagcccttggtggttagagttggttgttgtactgaagcaggtactcttgtttcagctgggctcttatggccaaccgttcagcttgcatctgccagccttccagagatatgtcatatttggctgagtcgagggtcaagggcagagtggccaggtgcgatggagtaaactttgggaatgacattttggtgacccagcacacaactgcctgaaattccattttcatgtgacacttttgtatctgtaaccatcaggtctgttccctatgttttctattccttaacttggctaccattataccatcacatctctttccttttctagtgactccccattagactagctcctatctcataacctccttttgtaatttaatggcccaaagattagcaaattccagaaattcctaaagtaatccaattagctcagaacatcatagagacttttttttttctttgcctcatcctggggttatttatcaatgaaagtgactttagattagatagacactggctgccacatcgtatcgttgtgacatcctgcacttaactaaaagggcttgacttaggcaccatctccttctctcttggcagctgctcagttagatgtttttgttttaaccaaagggcaggacttcaaatgtgaccctatttaactccatctggttatattttgaccttatgctctttttatatcctgattctgtcatccattctcttagctgtccttcccagcttgatgtaatagtattttcccaaactacacccttttccataataaagattgtcactcctccctcaagcttccttaagcaagctttatcatatgtctgataggatctctgtttctgattgtactcagtatagatttgtttcctggcacacatgtatgcactatgtcacttaatcacagtgcccctattagattacaaactcctgtcaccaagggttttgttccctcttttcaaagcagaacttaaaagaattttgcttacctttaagcgtgcagttcacatcattgactttaactggatggtggttgatggctgatggtcaactaacaaaaaaggagttgaggagttgaggtttcagatataacagaaggatacttaagacttttaaggaataaaaaactaatttttcttagcacaatggttcagatgaaagtaagggtgcatcagagaaggctgtcattggtttatttgttatattcctagctcatggtgattgtatgttagccaaatatcttgcatttgattttaaaacaaatcagaagtagatgactcagaaatgttgacaataaaattatggacaagccccttgctacagcagctcttattaattaaatatctgagacagcagaattaaaagagaagaaagtgatatacaatttggaaggtttggaaagctggccataaaattatttctttcagctggagataccttacctacttataatatataaaatttttgaagaaataagaataggtcttattttactttgcagtgaaggcttgaaatatttgaaagttcactttattgcaataggattaagtacatcaaacttcatccattcttatctctctcaaatattaggagtataactttcaactgaacttctttgcctgctgtaatatactgttctatagtgatattttaaaatgaatactttgtgaacatagtactagaaaaaggatagtgttttgaatattttaatagccttacagggttaaaaaaggatcttataaaaagtatgtttagtaccattcaatttttacaaatttatgcatttgcttattcatatatgtaaatttaaaatttacatataagcttatactcagaaaaagataaatgttgtaaacacacttgcatgcacacacacaccataacaaccaccatgccattcagtggttatttcagggtaagtaggattgcagaaacttttacatattcacgttttgcctatattttctgttataagcttttattttggcatgagaagaaaaaaattttaaaatttcccaaaaacattctttgtaatagtcaaaaattaaaatgaacagtgtctatcaataggagaatggctacaccaacaaaaaaagtcaagtaagaaataaaattggccaggcctggtggctcatgcctgtaatcccagcactttgggaggccaaggctggtggattgcttgagcccaggagtttgagaccagcctgggcaatatggcaaaacaccatatgtacaaaaaatacaaaaaaaatagccaagcatggtggcatgcacatgtagtcctagctactagggtggctgaggtgggaggattgcttgagcctgagaggcagaggttgctgtgagccgagatcacgccactgcattctagccagggagatagaacaagaccctgtctcaaaaaaataaaattaagcaatgggaaaagattcctcttgctattttaaatgttgatcaacattcaaattttcagtggttttaggtaacaagacatgtcaacctcctgaaacagtaattgttgtagataataagaatatatatgagtttggctttacctgattttaaaagtggagagaaaagctgaattgaagcaagcatacaattattttctaaacatatcctctccagtttcagtgttttttaatcaaaccaccaggaatggtgcagcagacaatgccagtccatgtctcccccttcatggtcccttagttgtcattaatgggtgactgcagagaaccataggcatttgaggacttaacagagatatgttttatattgagagtggacataagctcctcattgcctcattgtggtttgcacttcaaactgcagcgtgtactttttctaagctctgtggtctgccttcctaggactgcttgccctgtactgttatttcagaatgtttatctagtgaggagtgctgcattgctccattgtgcatcacagggcacaggaagcaatggtatgacatttttgctgcacatctatttttgattattctcaaaagatgaaaatgtttatcactgcaggggtgtattagtccattttcatgctgctataaagaactacttgagatatggtaatttataaaggaaacaggtttcattgactcacagttctgcatgactggaaaggcttcaggaaacttaaaatcatggtggaatgggaaacaaacacgttcttattcacatggcggcaggggagggaagtgcagaggaaagggggaaaaagccccttatagaactatcagatctcctgagaagtcactcactatcatgagaacagcagggggatctgctcccatgatctaatcacctcccatgaggttccctcccccaaaacatggggattacaatttggattacaattcgagatttgggtgaggacacagagccagaccatatcattccaccttttgccctccaaaatctcatctttctcacatttcaaaacacaattatgccttcccaagagtctcccaaagtcttgactcatttcagcgttaactcaatagtccaagtccaaagtctcgactgagacaaggcaagtcccttctgtctatgagcctgtaaaagcaaaagcaagttaattacttcctagatacagtggaggcacaggtattgggtaaatacactcattccaaatgggagaaattgtccagaacaaaggggcaacaggccccatgcaagtccaaaatccaatagggcagtcattaaacattaaagttccaaaatgatctcctttgactccatgtcttacatccagttcatgctgttgcaagagttgggtccccaccactttggcagctccacccctgtggtttttcagggtacagtcccctcctggctgctttcatgggctggcattgagtgtctgcagcttttccaggtgcgcagtgcaagctgttggtggagctaccattctggggtctggaggatggttgccctcttctcacagctccactatgcagtgccccagtgggaattctgtgtgggagcttgcaccccacattttcctactgcactgccccagcagaggttctccacgagggccccgtccctgcagcaggctcttgcctggacatccaggcatttccatacatcctctgaaatctaggtggaggttcccaaacctcagttcttgacttctgtgcacctgcaggcccaacaccacgtgtaagctgctaagccttgaggcttggaccttctgaagcaatggcctgagctgtatgttggccccttttagccatggttgggactgaagcagctgggatgcagggttgcacagagcagggggaccctaggcccaccccacaaaataaagtctttcctcctaggcctccaggcctgtaataggaggggctgctgtgaagtcgtctaacaggctctagagacattttcctcattgtcttggtgattaacatttggcatctcattacttatgcaaatttctgcagctggctggaattttcccccagaaaatgggtttttctttgctattacatcatcaggctgcaaatttctcaaacttttatggtgtgcttccttttgaattttcttccaccagatactctaaatcatctctctaattcacagttccacagatctctacggcagggacaaaatgccaccagcctctttgctaaagcatagcaagagtgacctttactccagtttctaacaagttcctcatctccatctcagaccaactcagcctggacgtcattgttcgtatcactataagcattttggtcaaagccattcaacaagtttctcagacgtcccaaactttcccacatctttctgtcttctgagccctccaagtctctaggaagttgcacattttcccacattttcctgtcttcttctgaggcctccaaactgttccaacctctgcctgttacccagttccaaagtcgcttccacattttcaggtatctgcagtagtgccacactactctcagtaccaactgactgtactaatctgttctcacactgctataaagaactgcctgagactgggtaatttgtaaaggaaacgggtttaattgacttacagttccacatgactggggaggcttcaggaaacttacaaacatggtggaaggggaagcaaacatgttcttcttcacatggcagcaggagagagaagtgcagagtggaggggaaaaagccccttataaaaccattagagctccagagaagtcactcactattattagaacagcatgggggaatctgttccatgatctaatcacctcccatgaggactttcccccaaaacgtggggattacaatttgcattacaattcaagttgagatttggttgaggacacagaaccagaccatatcaaagagtttgctttgacaaaaggaagtgtatctttttatttacttatttacaaagcagcttattaaagttattaaatagttttcaaaggggcagcttttttttctactttctgtattagtaagcaaccatctatgattgtaatacaactgaggtctcccaagagagaatgtagcacaaaacaaggtgtgctatctaaacctgtaagaaatgttgtgcagtgaaccaactccagcacagatatggagctctctcagaaacaacataggaaatttagatatgtgaaattcaaatagaaatagaaaactcaatttagagtttagtttgcgtaatatcttagaaatgttttcatggttcaaagctgatatttgacaattgtgttagatctataaaaattcacaaaacatccctataattttcagatacaaaatgctaataaggattttaaagttcaatgtggaccacagggcttctgcttttgcaggtgtaccttcatttacatcctttcagttgaggaagggtgggtgtttgagagcaaaatgtatgtataaggtaagaagaaaagagaaatgagagagagaagcagaagatagtgagccatcaataatgatattagttggcattcatttcaaaagccaaccaccccaatttagaggatttgcatttaggactaattaaattataagctaattgagcagggactgagttaagcctactgatagtgcttcataaatattcatattaacaataatacaagatgttccttttcaaggctaaaaactttttctaaatggtgtatacaacttgtgagtcttggtaagtcaatgttgttgcattcctgaatttttctatcccttttaaggataattctaactcaagtgaaccgaaattttccctgtagcagtagaggtcctctgaaaattgaggaagctctccatgtgtaatgctctgaaaatggcagacatttcagagtcacattctgtatatcattcatgtgaaatggcataggcaattttactcctcaagattctttgcccagaattcgcaatttaataagaacaagtattatgaattgttgaagattcttccagctctcttggaaataaagggtcttctcaaattgtagctttggtacattaatagttactctgggggcctaaatgagttagttaatgtgcagcttaaacatctgaggcacacccagaagtaactcaggactgaggaattcaccttcccttgctactcaattgccgtttgtgtaaaatagtggacagtgacactgtttgtgtgcagctagcaactgtctctaagtcttgggtttgttggagcataaagtgcactccagtgccctgagtatacctgtaagggtatttaccatgattcataagacttgttttaaaattcctctccaaataaacaccctcttaaatttaattttcctcatatttctatgtggttatttatagttcaagaacaagtatttaaaatatttaaatgatagccattcaattaactattccaaattttagtttttttcaccaaggagctgagctgattatcaaatatgctttatgtgaactctgttttgtttaaagtgtactgtattttttaaatttgtgaacatgggaaattatacaatgttctataataatttcaaacctgagttttttttaaatctcaatgaaagctgtaccttatctgaaatgtaaattagtgtaaaaaccctttcattctcaataattgtcggctactatctttttatcttcatgttcatcaatagtaaacattcaaccttcaacggttaacaaatattaagtgtttaccatgtaccagacacttttctacattctggggtgacagatctagaattacaagtgtatcaaatattataacagacaggtggaaggtgctacaggatcaaataagaagaggacataaacttaactgtagagatgggttggggagggaggaagaagttagtgttagaacaggcaacttttaaagaattaaccaggaagttatgcaatttggggtaaagtggggaaagagtgtcagggaaatgaggttgaaacagataatataagatttgctatttattcaaaaatagtttagaggccagtaattggctgggagaagaatggtgcacagatgggcaagtgttgacctgcaaggccaattagaaagctgtgtctataagtaaaggcaagagatgaggatgacctggattaggaaacaaaaaaatcctctcttttacctgcaaaaatagctgttgactttgtctcccttccatacaagacttggggtctccacgtttccagcaagagactgggcagttatacatctgtttttatttttactctgacctgactgctttatgcaagatgggccaagtctcccttatacatcaggaatgcactgatgtaaagacaagatatctgctcctccagccacctttcttccaggtctatctgccttaattcctcttcccccattctcagtggtgcatcattctctactgctgtcctagtcctgcctcagttttccattagttttattttgcagcagagattttttttttttttagtgatctcctattgttccttaatcacccttgaaatatacctaattaacccaagtaaaccttcatgatgcatgtctcttcatcctaggagtataaatgatccttgtatatctataggaacgtttctattccagtctttgaaattgaggaatttcatatacattatatatatatacacacatacagacacacacacacaacgtgtatatatgtgtatatatgtgtatatatgtatatgtgtgtgtgtatgtgtgcatatacatattccattagttatgaacagctcttttttatctcttaaaagcagcaaaataaaatattgacattattcagtgaattgatagttgaaatgtaaggatttcagaatgaaagttatgtagtaaatcctagccctttccgaatcctgatttcctaaatctaacctatatggaatttcttttttttttaataaaggttccatgaaacttggcctctttcctatcatcttaaatcgttctcctcttatacttctcttagttctacttctttcacgtgaaatccattctaatgtgaacctcggtttctctgagaggtgcctcaccacaatgcccatgcctttctgcacttcccacgtagatcttcttgccccaaatacctactgtgagccttctttcctctgtgcctttcattattccactcatctgaaattcagtcgcaccaactttttaagcacctttatcaggcactgtggtcagtaaggtttacagatgaataaggcatgattgccagtcactgacaacaaatttggggcagggagaacagccccatccccataaatggtctcatgtttcttttgtttgtttgtttgttttgatagaatctcactctgttgcccaggctggagtgcagtggtgtgatcttggctcaccataacctctgcctcccaggttcaagcaattctcctgccttagccttcgaagtagctgggactacaggtgctggccaccacacccagctaatttttttgtattatgagtagagatgaggtttaccatgttggccaggctggtctcaaactcctgacctcaagtgatccccccacctcagcctccaaaaaagctgggattacaggtgtgaggtaccgtgtcctgcccataaacagcctcatttataaaccataaatacataagtgctgagatagagatttgtgtgtgtgtgtgtgtatttggggggtggtggatacactttgcccaacaaatccaatattgtttactacttcctgtgcttcccacatgactgttctctcatctttctcttaaattaatggaaataccctcctaaccagttttccgactggtgcttttgcccatccagtctaatctcatagcagagttattctacaaaaacagtaattagttcacatcgtgttgctctctgctcaaagccatccaatggcatgccatctagagtcaaagtcaaattcttgctatgtctgttaaacttctacatgatctatgtctaccgcccctttcaagtgacctggatctgacatcttctcaaaccactgtccgcctcacccactcacttctccactctgacttcactggtgttccctgaatgtgccaagcatgttctgcatcacagcctttgcactacctgttcccagtgctgggaattctcttcctctaagtatctggatggctggttccatcctgcccttcagatcatcgctcatatgttactttagcagtaatcctttcctattcatgctttttcttccaccttgacgttccctgctgtatttttattcatagcacctatgacctactgtatcctttgttatctgtttattgactgctttcatccaacaagaatgtaagctctataagggcaagggcttttttctgttttttcactgttgtatcctctgtgcctagaatggtacctgtcacataataggtgctcaatgaatatttgctaaaggatggaaggaagaagggaagaggaggaaggagggagagagagaaagaggaaagttgaaagaagaaaggaagggaagaaagatggtagggaagaaggaaggacagcagaaagtctcatgttggctttactaagtctctaacacttattaacacctgctttgtcttataaacagagataacaccggcctgtagcctagtgcctttcgaaggcaacattatctggatagaaactaataaggttgttctgtttatgctgcatttatggcaagagttactgactttccatttatagttgtgatataaagtttcttctttaaatgaagacattttatttcagtttttaaaaaactagtctattacagaatttttaaaattaataatagtatataggggatgcagaaacaacaaaaatcatgatgtagaaatgtggatatggcagaatcatgaagctggtagtcgaatgcctgaattggggataagtgaccccttcagccatgaaacattccctgactattgccatcttcccctctttcattcctgttgtttattcgactcctgtacactatcatgggttgaactgaaaccatttggtattgctcactgttgttttgggtgttttagttctatcttcctaaattgatataagatccttgatgtgagtgctcatgtcctgcccccctcctcctgggcagccaccatagtgcacagcccagcactgacaaaacagaacattaaggatgtttgcttgttgtattcatcatgactcagctacacaataagacatgaggttaaatagtgtgcagacagtaaaaatactcgagcgtgctttatttttttttttagcaaaagaaatacaatagcaaacatcattttgccttgcaaactggcaaaatgaaatcactatttttgccactggtgtaaattttatacacacacacacacacacacacacacacaaacacacaagtacatacatatatacttattcaatctggtaggataaattaatcactaggacaaaaccatgagttaataggagccaaattccagcacatccaattggaatgcttgagaattaaacctgctaaaaatactgactggaataggaagacattcataaaacgattaggcacattttagtggaagtcagcaacaacaaataattaattgatttaactaataaatttagatatttaaattgtcaaggaattctttgttcttctgttttataaatggtattagcattatcttttttactggaaactttaaaggtgtaaaatactgtcaagagcaaaagcaacttagattgcctgtaatgaccattacattgacaccattttttgcagtatgatttgctattaaatgtgaataacgtgaagaacaataacactcctagatcacctgctatgaaccaggcactgctctaaatagctcaggtattttaactcatgtaactgctacaaccctatgaaatatatcctcctttcagcttcattttactagtgaggaaaccaaagctcaatgaggctctgttaagttaccccaggtcacacagctagtaagtgtctgagctgggtgttagtgcacagtgatctagcacccaagtccatatacttaaacactacctttgaatgctgctctgtaccctatataaggaagctgtggcccaaataggcaaacctgtgacaaacgaatcctagagtctaaaacaaaggttgaaaggtgactgtaaaagtaggcatttgatctttaaaaaccaggtgaatttgacctgccattcttgacggcattagtaaacattacatttcttataatttacattaaaaatctaatacttcgtttacaaaaaaagactttcaaagaatatgcatgcattttatgcaaggttaaagaagttttcagtgctggctagtgaaatgggggttagatgccctgtctatactacatgtttaatcaatgtaatcttaaaatgagatgaccttgtagccaagcattttttctttcctttataagcaatattaactatattaaatcaagaaagctaatagtttttcgtatttctcaataaccattaagttcaaacattggaagagtttaatattttacatgaaaaatccacaggcaataattttaagtgacttagaaaatatttaccgtattttaaccttaaatgactgtgtatgtgtgtgtgtgtgcctatgtgtgtgcctatgtatgtgtatgtatgtttataatctagtagttctcaaggagtattggagaaagaatatgtgatcacatgtagtttataaaagctctcgtgttttttgaaagacaaattttttgtcaatctagtggtaacatgatactaattttttaattaattttaatttccctgataatacatttaagccttaaaaatattgttagtgattcatgtttctttttctataaaaattatttctaagccttcctcaaatttcttccagactcttttttctgattgatttttaagaattttaaaaatattctgcaatttctcttgatcacaacaagtgttggaaatatcttctcccgaagaaaagaatgattcttaaaaaaatactttagtagcagtttttttctatgaaaaaattagaagtagctttttcttggcagcgttttcttctagagcaatagggaggaaaacagaaagctgtagactgttatcttcgtccatacatatgttagtgctggaactcaactccaaaaactttgttcctttgaaaatcatatccctccagaattggtggagtggtgatggtgtggtgttgaaggcctattgccaggactgagaaggaaaagctaaagaaagagggaaaaaaaatccagagaaagtgactgcctggggaggagggataggcaagagaccaaacatcgattctaaagggaatcttgcaaatgctctggcaagtctatgtatgggaacatcatttgcctagaagatgctcccctttactccctttttccctattgggctggtttagaggtcaataaacttaattattttacatctagtaatgtcccagatgatataaaatgtcattgttttcattctatcatatagttcatgaatcacagttaaaataatgtttcccttctaaaaatttttcaagttttttatttcaccgtaaagttcttttacatatggaattgaattctgtgtgcagtgtgagaagaaatccacttttgtatgtttcccatatggctaactagttatttccacaccatcgattgactgatccatcatttttccactgactggtagtgttacctttgacacgcatcagtacagttggtctgctttacctttctagctataattgtggcgtatccctctattaattgcctcctttagtgttattcagtgcattttatacattttgttacgaagatcttatacattttttattcacatccactgtagacttctgttgctattacaaaatggcaacaattttcagttatattttccaaatgcttgctgcagctatatccaaatctaataatttttatatcgaacaaatatttagaaacttttcaaactttgatgtacttttaatgatgtttcttctgattcttttaggtattctttgtagacaatcgtatcatctgtgaataacaaaaatttgtttcttccattccaatttttatactctatattttataccactttttaaaatgatttattgactggctgcacggatgcttctctgactttaaaatatgaatccctgagggatccttttaaaaggaagatcttggttcagtggtaggtcaggcactgagaacctgcatttctaacaagctcccaggtgacagtgaggacacttgtccaaaaaaagcaatgctttcaaaagactgttaaatagaaatggagagaacaagcattctttacttgtgtctacaattaaagagcatgcttccacatttcaccatcaagattagatatctttgattagttttggtaacttcctcctattccaaatttgccatacatttttatcgtgaatggttgtttagttgaataattttctgtggtttttcccctttaatctcttaacattgtgaattattagaacatctcatgtttaaagcctttcatgccatatgcacacaaatatacatacacatataggtacatagaaaaatatgtatttattgctgctttatttgctaacatttggtttagactttttaacctgtctttatgattcagattggcttcatgtaatccttgaggattcttaatgtttttaagtttcattatagaatgaattaggtgtataccctcttattctaagctctttacatggaactcacttttatactagtttttgagacacactctgttataatcagcatcttactgatgaagaaacagaggtacatggaggttaaataactagcccaaagtcacatagctagtaagtgataaaattcgttggtttttgtctgttgaacaatgaagagaatggtttcctaaaatttgttttgtttagtcactgattcactagttcaatcttaaatgtaattcagtagttcagtcctagaaacagttttcaaagccactaaaaacagatttagatcctagtgaggtaaaaataaataaataaataaaatgattttgaggccactgagaaaagtggggcccctagtaatttgtaacagcctcccactccctatcaagaggaggtggtagaccgagattctaaattgaaaaatgaaggccgggtgcggtggctcacgcctgtaatcccagtgctttgggaggccgaggcgggtggatcacaaaatcaggagatcgagaccatcctggctaacacggtgaaaccctgtctctactaaaaatacgaaaaattagctgggcgtggtggcgggcgcctgtagtcccagctactcgggaggctgaggcaggagaatggtgtgaacccgggaggcggagcatgcagtgagccgagatcgcaccactgcactccagcctgagcgacagagcaagactctgtctcaaaaaaaaaaaaaaagaaaaatgtaaacacttaccttggctttgtcacttaatggcctatgtcaaaagcttaatttgcttcatgatttcatttaaagtgtatacctttcactgaattctgcagtgatttagcataattcactaataggtatatgcctatcattttcataacctttcaggaaatcatttggccctagtatactgactttcgctctaagttttcctttatacctgaatctcaatctctcttactgagatttaaacctgtatctttacagcgaacttcagaaacatgggaaagactgtcattatccttcatgaaatcctgtggtccacaatgaagcgtgtttattttgttaccactcagtttgatttctttcacattgtttcatggtttttcttaaattcttacttactctttagcatgtggaagtactgcctttcaatgtaagacattttactttaacaattcaaagagatttttttttctatgctacgtagatattagggtacagaagaaaatacaggagacattagcctgctcatgaaggttatgaactgcacaaatcatgtagtcttttacaggtttaattgcctcatttgtgaaaggaggttgaactaggcagtctctcacctctctgtcagctctgatgttaaaggattttgttcatccttacaatgttttctcattaaagctcaaatatgcataattaatgtaatgcattattttttaggagattgaaaacctatcatctagatgatgtgctaacctgatttttgtcaatatcattcttgattctgtttttatatctcaatatgatacagagttgcaaaatatttctaagctttgatcattcttttgggcatattcctgtagataattttgaaatgatatatttagtggagaaaatgtaaaaataatattaaatccttctaagaaaaaacaaatgtattaataattaaatagctgcactgtaaaccaatattcactattcaatcattgattaccaaaaagatagcggcatgaaaaacctctatatttttatctcatggtttaagatgaatattttgcccttcatatttatcattttttaaaaaagaacacatttagactttgaaaacgatatgtaatgtgcttctacattaatgggaaaaacaacctaaactgtatagtcaaataaaatattggaatcttataccttgacatatttttttaaactagacatcatctaatttcttttcaaaaatagaaataactttttatctttgtccttggtattactttatacttgtctgttcagtggcattgctattctgtgataagattttattacagaaaatgtctctatctgtacttgaacattagtctaattttttttacaaatgttccttgatttgacatctgtcaactgatttctgagttaatattatcttttcagtttccattcctttgaaataggaaatccaatattaaacccttcaataaagatgaaccctacatctgtatatccagaattttggtttgataaaaccaaaactgataagttcaatggggttaaacattcttgaagtaaaattggagagacatttgaacacctttaccccaagttcattcatctattcatcttctctttaattaagtctgtttgaaaaaagctttcattgattgttagcttcctggaatatgtcctaaatatcataaggcatatggagctccatgactcctcagaaaagagcacgttgattgatcagtgattctgcattagacatgcgtgctacaagtttgatttgactgacccagagaggaatataaccttaatggaaacagagaaaatatcttcatgtcacttggcttagcctgctcctttcaggggataagttgccacagcattcaaaagggtgtagtctatgaatatttttagaatctctaaagatgaggattttacaacatggtattcaacagcagagtttaatttttcttttttctcacttaacactgagtcattaacagttgagacattttacatgactgtgagcagttgagcacaaaaaccagatgttaagattgggtacagtcaaaagtttagacatccacacctgtgttatgttttgtttatgttctggagcgccaaactttgttacatctttgaacccacttcagacctcaaattaccacattttttaaaagcctcattagaatggtatcatatagtgctgaatccatagaacagaaattcagtgttttcagattgctaatcatgtatgaaagtttctgaaatcatattgtccaacgggctgtaacttggcctattcttctatctcctaaggaaattgaattgactggacactgttcattataaagatacagcaggtacttccttgtaacctgtgctcttctatatattttgaaaattattattcattttcatatttatcaaagtgaaaaaagcaacatagctactctacttatatagctcattttaaggaattttatacttgttttctagttttgtgaatttcttatgaattcacaaaaataatgtaaaagctaatggtctgtccctgctaccattgtgcatattagtcaacaagtacaagtagaatatttaaaagatttattagttcctaattatatatagaaaaagactttgaaaattacttaagccatgattctaccaagatgtaaccacttttattttcttttttccttcccaatgttgactggttatatgcatattaatggagctataataataattgtatactttttatcttactttctaaaccacattattattccttaaatattgctctttcttctgacacagtcttctcatgtatcattttgattactacataatattctgacttaatcgaaactttttgtattttttgatgttcaagcttcttttctcatttgttactattagaaatgatggctctagaaacatccttagaagttttccttatcttttaaattaaactgcttttattttactaaaataatctttaagaactgggattactaggtcaaattctacaatcatatttgtgtcccctgtcattttgtaaccaaaaagatgctatttgagtaagacctgcttgataacttacttattaatcttattttattttgtcttgcatcacaaatgagtcaaattctatttttctctaattaaatcttacgatcaccggtacttggatttaagttttacagtgaaacagaaagaattttaaaaaacggtttaagtaggagaaattatattttcagatctccttgcctatctgctggaatcactagtgccaccacttttcactggtgctccttttgcttcacttaactaaagagttttcactcagacccttatgatttctccaagatgcattacattttcctgctgtttccatatacctgggaaatagttctttcatttacatcttctgtctctatatttttccaggtaagtcatgcctcctttaaatttttactattttttatctatgtctgtctatctctactaagatgttctctacctttgtttctgtctacctaactagctagctacctacctacctatctggaactctacctctgtctcttatactatgcccattcttctcttttctctttaaaatttttttgttgctgttttctcttttcctctatttctgtatctcgtttgtgtcaaattgccagactacttaattagtatattcatgtttgtttttgaatttctattactgtattttctcttattagtatttgtttttataattattattttcctttacttttttgtgtttattttcctattttttctaagtaagttgctttgtgcattgagttttagcctttatttctaatacagtgatttaattctattgctttagtgacaatcccatatatttgatgcataatatatttattattaagttttaagtattttataaatccctttgatttcttctctcactcaagtgttatttagaagtactttttaaatgttttccaaaggaatgagtttttaaataaatacattgttattaatttctaattttgttcatctttaacagaagagatatttgtatagtacctattctttgacattgttgaaactaaactgaaaatattagttaattcatgaacactggattaattataattataatattcaaaaaatataattatattcaaaagtataattatatataagtttatataatttataaagtttataatataaacctatattttatatatttataacttaatataaaattataaagtttataatataattataatattcaaaaatattaatttaggcttcctatttatcctgctttctaatgtttgttttcttttcacgtcttttctggcattattttagatcaaagtgatttcctcccttttctcattgtatttttccttctagtttgtaagttttaaactctaattctattattttaataataaccctaaaaaattttccaaatatgtaacttaaggctgaagttaaataatatctttacccttttactgtcctcctgagaaaatacaaaagaatagatttttgttctcttcatatttgtattacattgtagacattatcattattattatagttgtagtaagtcatctttggtgaacattttctaacacattttccattttctttgctcagcattttttttttttttgcatctgagaccatcctttttatttaaaaatgtcttttagaagtttctctagtgactctccaatagtagggaattctcttcatgtgtggttttcttactatcttattttgtgcttagacttggaaggtagttttgttgtgtatgcattactgggttgacaactacttctcttcacctctttaaatacgatactaccttgtcttttgagaaatcacttttcagtctgaccagtgttacttttttctttttgggtgctttgaaattcttatttttatctttgttgttgtgcaatttcactctaatgaatccagaagttgagtttttcaaaagtttacttaaaatgtattggtattcctaaatatgagtgttggtgtcttttatttattttggaaaattcttagctattattgtttcaaatattgcctcgttgccattccttttaatctatcccaaccctagtaagacttatgttggccccactctgtcattcacctatcttaaccttgctttcatattttccacttctttttctactgcattctgaatgtttcattcatatatgttttctggctcactaattcaaccttcagtagagtctaatttgttgtttcacctgtttgttgagtttctaatttcagttattagacattcaattttagaagttctattggtctttattctaaatatgtgtgttgatttttattggtcttttgctcatttactaaattttttatcatttctttaaacagcttaaatatttttttttattttagttccttgatagttccaatatctgtaatcttgttggtctacctgtgcagtttattccactgattgtctctcaggcaagtttattttttttatgcattttctatatttttttacatatgtgagctcatactctttagtattttatctctggaaattatctgtgttgaaagtgtatttttcgaaagaggatttgcttataatttaagtaactgcatgtctgctaactatagatttactttaaatgaaatgttcaacttttgggccacgcaaatatccaatgccatattacatatcgcaagtatacacttgtgattagaaatttttgaaagaaatatttgttttaaatatgctgcctgaaaccaagacaagtcttgttctgcatgaaagattgtagcatgcctagttataggtattgacttttgggtataagactttctgtgaagtctgaatgtgagttctttctctgtttaggccccttgtttagattcttgccctggaacccaaagaattggtaaatgccttcaggaaaaaaacaaaaaaacaaacaaagcaaaaaacaattctagtacttagttatccctgtgggaccaagctttcttaatttcaagcctcaaaaacttttaatttaatgatttaaagcaatcatccagtataattttagagcaaattttgttgaattataccataagaggaaaaagcacacaaacctaaatgtaaaatgtggtaaatttccatgaagataacatacccatgtaagcagcaattagattaataggcagtatattgctaagctgtagaagcccccatttgtgtacctttcagattctgcccccaccccagagtaactactattgtgatttctaagataatattcatattatttaccaaagagagtgtgttctttgttctctagcttcttttcctcaacactgtatttggaaaagttatctttcttttttcttttcttttctttttttttttttttttttgagacagggtattgctctgtcacccaggctgtagtacagtaccatagtcataactcattgcagcctcaaactcctgggctcaagcagtcctcctgcctcagcctcccaagtagctaggactacagacatatgacaccacacctggctaattttattttatttttttgtatagactgggtctcgctttgttgcccaggctagactcaaactcctgggcctaaaggaacatttgtctttatatatgtagttgtagttcattttcatcttcatacaaatatgttataaattatttattcattttattgttttgttttgttttgttttgttttgtttgagaaagagttccactgctttgcccaggctggagtgcagtggcacgaactcgtctcactgcagcctctgcctccagggttcaagcaattctcctgcctcagcctcctaagtagttgggtctacaggcacctgccactacacacggctaatttttgtatttttagtagagatggggttttgccattttggccgggctggtcacgaactcctcatctcaaatgatccacctgcctcagtctgccaaagtgctgggattacaggtgtgagccactgtgcctggcccattttattattggtaaatatttgttttatttttatttgaaactattacaaatcatgctgctatgaacattactgtatacatctttttgtataatgcatatatatttctgatgggtatatagccagaagtggaattgcttgattatgaggcatgcattttttgaagactgacagacagttttctcaagtagcttcttcaatttagattccaaccaatattctctattttctaagagctccacattcttgtcaacacttcgtattatctttttcattttaaccattctagttgagtaatatgtagtgttatttcattgtaattttaattttcacttcactgatgtctagtgattctgtgcattaatttttttttctggacttttgaagtgttctgtatgggaaactattcctccatttagctagctattttgctggaaattattgtataaaatatcatctcataatttaacagtatattccttcttctcttcaaatttttattaaaataatttttcagtactcttgaagtcaacttttaatttgtccaacctgtctttgagctccccctgctgttttctatttaaactatatacctgttgattatgcataattttctttaaaatgatggattcttagccaataagctattttaagcagaagcattttttttgccaaagactaagggtataaaataaatttaaatgctaactcaggatataagaattattaaaattaatgcttgaaaactagtatgttacatatgggaaatctgtataccttcataatttcactgtgaatctcactcctctaaaaaatgaagtcttgaaaagttagtattttaaaatacttaccttacttgtaatgtgaaaccatttatattaatttagcaaatcaatgtttcaaattattaacaactagacaaactactgagccatatgttaggtatattgtaagcatgttgaagtcaacaacatgacttctacactttctactttctcacggttcccagaatatctattttgacataattattgaaaaaaaattaaaagcatttattccattgtcttgctacatctaaattcatggtgttatgtttctttagggcaatggagctgaaatgaataatggataccatgtagtgtttttatatatttcatctatgagctatgacagatatctccctacattccagcagaaaaaaaaatgtgcttctttcctaagcttgccagctataaaggcctattagacattcagagattatcaggaagcaaaaagcttcatagtcttaacaacgtaaatctgaagtcttagaatgagttcattagaatatagacattgaatatgaggtaagtctgagttgaaattctatctctgacaactgctggatctgtttttggtttccaatagtaaaatggcactaataatgatatatgcaaaatgtaaaatgcttagcacagtgcttggcacatagtagattctaagctgtagtttaaacagctattgtgctatgaataagccatacgttgacattttccctcttgagaatgtgctatttaagtgtagaaaacctgctttcccctgtccgtgtgaatttccttaacattcatcttggaaatgataccacatacccttatattgatgcactgcaagaggccaatctaatgtaggcataaaaagagtaatctggtaatctgctcttctcagcaccctctgctaataatgctgtttgaacaaattctagaaagactgttgatgccagagccaactcagaattaggcaggtgaatgttttcaacttctgctaataataacatcagttctgtactctcctctgggttctttttgctgtattaaagctgcagttcccttaggttagcttctatgcataacctgggaatgcatattttagctttttacttccctcccaaagaaaggagcagaagaggagaaccaaatagccaagatctagaagatgaaactgttgtatccattgtgtggattcagataagcctccacccaaaatatggttcaaatgttaagactaatgagcagccctacacttctctctctctcactttcacacacacacatacacaaacacacgcgcacgcacacacacacacacacacacacacacacacacacacatatacccctaccaagaaagtatgaaagtatgtattacttataaaattatgaggtttttctggggagagcagagcaggcctcccaagaaggtctgaagtagcttgagagagcagggggaaaatgactggtttgagattttatgacttttagtgggtgaggccatgctgagagttttgtgtgggtggactctggtgtggtttgaatttcccaccatcaccaaaggagagaacacatgggctttcttaacagttttcccaaatgtaggacagaggggaagagagaggtataacactttaaagctatcagcaatgacacatcaaaaaatggacatagattttttattacagaaattaaattgtatgagaacagaaatgaatcccggtgctacacagctgatgtttcctaggaatgagaactagggtaacttttttaaagcacgtgtttatattgattggtacatactagttagccaaatttaactgggttgagatggtggactttccttttgaacctcagttatgcaaattgtaagaattgtgtttccttcaaattactcaaaataatattgaatttcttacaaatgcaaaatgaattgtggcttaatgtgcatatgtatataacagatactttgttcaactatattatgaaatactatagtatgtaactttcttaaataaacaggatgacaaatcagtgttaggattcaaatgggccctatattactctgtatctctcataggccaagtgttaattctggtacacatgacatttagcacatgctattacatttattgattgcatatttttatctgttatcttttggttcattctacaaggattcttcaaaagaaatcaagtaatcctagaccccaatatataaaagaaaccaactcatcctagacccaatatataaaagtaaatgacattttgttcttgtcttaataagttcacagtatttcaggaaacatgggaatacagaataacagataagaaatattataagacttctagtagagaaatatgcttaaaatcatatgtatgttcctttacacctaagaacctttagatataaatgcattttaactgttctggagagttccaactccaaaatagcctttgttcatatcaagaaagtaaaccaccttctatttcaggtgggcttactcaccatacctggggccacattactgtcccagctcactgaaaggtcataatccaggatgaaaccaaacttgaaaattatagtgaaacacagtagaataatttagaagcatatactttgatgtttttagaaagtaaggaaataaaactttaattgaacttggaataaactcagttctgagcattccattctactctgcagttgtcatttatagacagctgtggatcataatacctatagactagatatcgttatctacttatttatattaatgacaggatatccctgggcaaacagcatcaccactgtactgtgtattcttggttgtcatgggaacctttgctgtgaaccagcagtgagagcacttccattgaataaagctgcctctggatagccatgagttgcatgaagttattttactaattttatttgccttttacttgaaagcataagtttctgaggatgtaattacagtttcccctatatttctacagaagtagttatagatgatggacctcctgaacttttatcactttgccatactctgtaaaattacctaagagctccagagcatgaaattaacactcaggaatattgtagcctaaccttttttgctactctgaataatactgaattgaagggtcttccacagcaagccctctttaaattatgctttctgatgctttacctaaggctatacacttgtctttagattcttctagattattttctcctaatacagaacttagcatttaaatgacaattttaaaaattgagatcaactcttcaaaagaaatcaagtaaaagcaatttcagcaaaaaaaaaaaaaaagccttctaatctcctacaaaacacctctatcctatcaagatattgtgattgagaattagaaatagtgtggaatcagatgttagtttgtcctttccttttcactggaatttctccatgctttaatttttatatcaagaaaaacaattcttgcaatattccctaaggagagttttacaaaaaaagagataaaacaaactacacacacacacacacacacacacacacacacacacacacactaccttaaggaataaagaaattatctgagtggaaaataatggtgctttcaattttcctaattgaattaaaataattatctaagtctttttgatcttgtcccaaagtgaataaaatgtctttttttaaatttatgtttcattagatatatctccatcttttcagtattcaccccaagttttaattgggtagaagaatatggaagaaattcctattgctcagacaccatgtttaaagctttctgaatgtgatctaatacctccattggttggaggtaattaaacagagatctgttcttttaaacaactatttgagtgctttaaatctgaaagtcatgtcataaatgtcagacctctttctctttgctttaatcatctcagaaagacttatctgttaatggaacatctgcatataggtattttgttgaccacaggtgttccacataagtttaatctacctattagttatatgttcatgctattgaggacctttcaataataaactttactgagtgcttactctcttctaagagtaatgcactatgctaggagacaggagggatataaaggtaaagaaaccatggcatgaatctttagggagattataatttagtggagaacactagtgaaaggaggcaaaggaattaatagaacaagacagtttctctgagtctccaaaggcactgtaaaaattcctggggaaactgcaagcaagagcaaaatgttagctatcataaacattctcatgcatcttcaggttttatcttcatccataaatttacccattaaatttagacattctactatctattccacttgacattccaattagcagctcagcctcagcctatcaatatgaatgcacatcgcttccctgttctcttgctgtgccagtctttccccagtgtagttaggtagtgtctccaatcagtcaccatcaccatactgtgctgattttatattctgaatattttttaagctttttcctttttatcaattgactacactagtttagatcttcatcatattattgtacacaactgctgggttttttctgtctggaaagtctattttcctctttcctccccagctgcctctttcttctgcctctggatgcatttcctcattttcctgccttccaagatgtatttaatacattcctctgtgctctcatatgctgatacatgtctgtcgctgtatttgctgtgtaatatccaaattatttgtgcatgtctttgtttttctccaaaagttgcaagctccttaaggtcaggagctgttctttaatatatctactctacctagtgtagtcatgcttaatatttgttgaagtaaacaaatctgaaccccaaatgtattatgtaatctccatatcccagcacagataaaggatatgctcttgaattgttttattgggagaaaacagctgacagattaggctacacaacaactaaaaactaagaaatgactacatgataaattgtaatgaaaatcggaaggcagactgactgaggaatatatctctaacaagtattcaaagatataattttgttattgttaaaaagaatacaatgaatggagagagggtttggatttcacattcaggacttctgaagaccaagtataagagattcaaaagtgataatgtgaatctgattagaaaattcaattttggaatttaaataagaaaaaaattagttggtctagcaggtgaggctataatatggaaaaatgagaaagggatacagcactgaaagtgaaaatgtggaaagagagaagatcagaaggggagaaaaaaagaagaaataaagggttagagtttatgaactgtaccaaaagaaatgatacaatggccagtcctgtgagggtagtagagggatctctttattgtattttcttattttatttttattttagattcagggagtacacgtgcaggcttgttacatgggtaaattgcgtgaagctgaggtttgggcttgtaatgatcccactgcccacgtagtgacataggaccatagggagtttttcaacacttgctcacctccctcctcccacccttttggaatcctcagttgttcagtgtttccatatttgtgtccgtgttgcctccagtgtttagctcccacttataagtaagaacatgtggtatttggttttctgtttctgtttcaattcactgagaataatggcctccagttccatccatgttgctgcaaggaacatgatttcatctttttatggctgtatagtatttcctggtatatatgtagcacattttctttatccagcccaccattggtgggcatatgggttgattccatgtcattgctcttgtgaatagtgctgtgattcacatataagtgcaggtgtctttttggtagaatggtttattttcctttgggtatacactcagcagtgagattgcagggtcaaatggtggttctattattagttcttgagaaatctccaaactgttttccacagtggctgaactaatttgcattcctgccaacagtgtgcaagcgttcccttttctccacagtctcaccaacatctgttactttttgatttttttaatatactagccattctgagtggtgtgagatagtatctcattggttgagtgtggtttgctaatattttgtggaggacttttgcatctgttcatcagagagatattggcatgtagggtttttgttgttgtgtctttgccagattttggtatcagaaagatactggttttgaattaggagttcctcctccttgatttttttttttttttgaatactttcagtagtatctgtatcagctcttatttgtatgtctggtagaattcagctgtgaatccatttggttcagggctatttttggacattaggttttttattactgattcaatttcattacttgttattggtctgttcaggatttcagtttcttcctggtttaatcttgggaggttgtgtgtgtccagaaatttatgcatctcctctaggttttctagtttttgtgcatagagatgtacatagtagtctctgaggatcttttatgtttctatgggattggttgtgatgtcacttttgtcatttctgattgtgcatattcagatcttctctcttttcttgttaatctagctagcagtatatcaatctttttttatcctttccaagaacaaacttctcattttgtatatcctttgtatagttgttatgggtctcaatttcatttaattctgttctgattttagttatttcttttttttctgctagctctaggtttagttttgttcttgtttttctgttttttttttttttttaggtgcgattttaggttgttaatttcagatgtatcttcttgatgtagacattcagtgctagaaactttcctcttaacgctgccattgctgtactctagaggttttggtatgttgtatctctatttttgtttgtttcaaataacagtttgacttctgccttaattttttgtttattttagagtcattcagaaacaagttgattagtttcctgtatttgtgtggttttaagaattcctcttgctgttgatttctgttttttttccactgtggtctgagaagatgcttggtatgattctgattttttgaaatgtattaagacttgctttatgactatgtgttcaatcttggaatatatatcatgtgcagatgagaagaatgcatattctgtagttgttgggtggagtattctatagatgtctattaggtccaattggccaactatcaaatttattaaatacaaaattttttgttagttttttgcctgtctattgctttcactcgtgtgctgaagttccccactattattgggtggccatgaaagtcttttcataggtctataagcaattattttataaatatgtatcctccaatgttgaacatatatatatttaggatagttaagtcttcttattgaattgaacactttatcattatgtaatgcctttcttggtccttttttactgttgttgtttaatgtctattttttctgatattagaatagtgatccttgttctttttttgtttcctatttgcatgatagatctttctctatccatttacttgcagcctagcctatgggtgccattacaagtgaaatgggtatcttgaagttagacttgtttttagtctaatttgccactttttgccttttaaatggagtgttaaaacactatgacaggaataaaaccttacatatcaatattaactttgcatggccaaagttaatattttatgttaaaacactatggcaagaataaaacctcacatatcaatattaattttgactatgcaaaagttaatattgatatgtgaggttttattcttgccatagtgttattatctggttgctttgtagtattgattcagtcactgcttagggcctgtgggctatctgcttgcatgtgctttcatggtaacaaggatcatcctttccttttgttttcatgtttagaactctcttaagtatctcttgtaggtctagtgtggtggtgatggattcttttagcaattgcttatctgagaaagaatttatttctctttcatttatgaagtatagttggtgggatatgaaattattggttggcattttttttctttaaaaatgctaaaaatagtcccccaatctcttctggcttgtatggtttctgctgagaagcctgctgttagtctgatgggtttccctttatagatgatatgactgttttctctagctgccgttaagtttttttctttcacgttgaccttggatagtctgatgattgtgtgccttgaagatggtcatattatatagtattcttccaggaattctctggatttcttgtatgtgcatgttgacttctctggcaagattgaggaaatttccctgaattatatcctcaaatatgtgttccaagttgcttagtttctcttatctcagaaatgccaatgtcactttacataaccccatatttattgaaggttttattaattgtttaaaattatttttttctttatttttgcctgcctgggttgattcagaaagctagtcttcgagccctgaaattcattcttctgcttggtatagtctgttgttaaggcttccaactgtattttgaaattcccatagttaatttttcaattccagaagttgtgtttggttctttcttaatatagctatgttgtctttcaaatcttggatcatttttctggcttctttgtgttggatttcaactttctcttggatctcattgagtttctttgccatctagattctgaattctatatctgtcatttcagacatttcattctggttagggttcattgcttgggagctagtgagattctctggaggtggtaaaacactctgacattttgtattgccagagttcttgtgctggttccttctcatctgagagagctgatgcttttttcttttcttttttgaatttgctattgtttggatggagcttgttgattttaaattcttttttcccttgtgggtatgactgtggtgtaaaatgtgtatgggtggatcagcttcatttctgagtgctttcagggcgccaaggctctgtatgggttccttggttgcagataagtttgtgcggtggctgagacgttgcttcttgtagtgatgtaattttgttttgtagtgtaattcaggctgcagcccagtaggtggcacttaagagtgagcgccagaaggtaggggcaagggcagaagcaatggaaaagtctgcaaagtgccctccttcagcgcgtttgccttcagtgggagtggaattgctggagaagccccaaaagtggtctctttcagcccacactctctcggttccgctggggagagccaccttcgagtccgcaacagtacactgaagagggatgagagaggtgagcgatgaccccttctcgacaaccattccctggctttggtggcgcccccttcagtggctagcgcagtgctcctgtttcctttgacccaacctttgacccaagaggggctttagccggctacatccccctcccttaggggccgactgaaccgagggctagatttctaggggagtgggtcccttcccttaccacttttcagagctggtgggttactgtcccccaactgaacaaggaagccgactggggaacccagtagttgatatgtaagggatgctgggaagtgctgggtaaagaagggtgagtccctggcgagggctccacccccaggcctgtgcccacggacctaggtgaggacaggcactccagcctttgggcccaaatgttgcatttcccaagaccaacctagcctaccatgccccctaccatcctgtgcctataaaaaccccaagaccctagcgggtagagacacaagcagctgaaagtggagaggacatcgaggggagcacgctggtggaagagcacaccaacagatgctgccacctggcaggccgtccagcagaggaatgacgcggagtttggtcgtggcagtcataggagagcccgggctgctgagcggctggactccagggggaaaccatctcccttctggctcccccatctgctgatagctacttccactcagtaaaaccttgtactcattctccaagcccaggtgtgattcaattcttccctcacgccaaggcaagaacccgggatacagaaagccctcgtccttgtgataaggtggagggtctaattgagctggttaacacaagctgcctatagacggcaaaactgaaagagcccatggtagcacatgcccactggggctttgggagctgtaaacatccacccctagatgctgccgtgggatcgacccccacaacctgcatgctcccctagaggtacgagcagcagggcactgaagaagcgagccacttctccagttgcacaccttgcaagggggacaagggaacctttctcatttcgtagcaacacacgcagactggttccaggtctcaaagctgcccctagctgcatgtcttgccacccagaagaaacctggcttcgggaactctcctgcccctgcagtcttctaatgctttatgtctcttctctatcgcatccaagcattctctcctagactatctgctcagaaggtgtccacttactattctggcgtttctctgttggggagccacacactacctgcttctgctcagccatcttgatccctttcatgtctctatttatgaaggatgaaaatggaatggagacatggagattgaggattgatgatgaggcttgttgaaatttgatgataatttcactaagaaacttagaaacagggccagggggtaataaatgagagacacaaagagaatggagtaagtagatatgatggacttgcaaagaaaaaaccttgttgaagagcagacgtgagctaatggactaagagaagcatgcaagtggggagactacttctgatagtaaacattttggaagagtgtgccatcaggagaaagcccgacttcagtgtggtcaaggagctgagcaagttatatccagaagtgatcaaggatatttgtgagtttgcttacaatatcataaaggcaggacaagactcaaggaagattcctagggaggaaactggtggggaagtcaaggccaaactgggctggataaggtagaaagagcatattgatgaaaataacagccttaggtgggaattgtagggggtaacttgaaggggatttgaatacaggagcctgtgttaaaaactagctttttcttttcttgctttttttcttagaaatgtatagaacacatccatttattccaacactccaagtgaggaataaggtttgggctcagcttgtagtccgcaccaatcactgagtattattttgaggggcatgtttacggggaaggtacgttgctggtgggattgtttcaaagtcttaatgcaagtgcctcaggtctattgctagacatttagaattttcttggttttttgaaagagaaagattagggatagttaatagtagtttaaaagactgtgcaaccttagtaacatttctttgcaataattaattaaaatcacaaggaaaatttttgcaaaagtttgggcatataaaataaatgaaagttatgactaacagttcaactttctcctgatgtctcacttttgtgagaactgatgtagaccagaaaataaatttctaggtgttttttgtttgtttgtttgttttgttttgttttgtttgcttaggttgacagatctaattttcatgtcaaattaggacactgactttccctaacagatgttcaggagctgaatttgtatcctaattctagtcttgctagtatttatttttgagacctgcaatccatcattatactaacatggcaatgcctaggaagtttaatggctatacgacttctagaaagtgcctttattacatatctgacacattgcaaattcacaagtggagtacaaacaatttcagcagcttagatgacattttccttcctgccagtggtctgaactcaccaggtagcaacacccaaagcattacattctgtctccctgagttgcattgtatttttgatatcacagcataaactgtcaaaggaagtatttctctaattttaattggggttactagggtcaaagccaagtttccaaagctcattttgtttttatcttattatcatgcatttatagtaagccatttattttttgaagcaatccttattataacttggaaaaaaactatttcgtaatgtggtcagatgtgattagatcactgttttatgctcagacgtatgttccaccttttcccataatgctgtgacatttggggtttgtatagcttcatgaatcgaacttaaacagtaatgcattttcacaaataaatagaatcactcttcctacctattatgatggatcttaaaatatcctgccacatctctctcgttattcattcagtttctgatcttagtaatttacctatacattaaaacattgtaattatgtatttaaatcaccaggacacctatcatttggtctctaaaactgagttgctggttgttagagaaaaatgtatttaacttgtatttatgaatataactggatgagattctggttatttaataggcagtttaacttgagaaacagagtagatgggaaaaatgagaacttactgtgctttaacaactttacattaatttgttggttcattgtgagctagtttattacagtatattgaactgtttaccaaatagtaaactcgattccagtgtttagaacatgcttttttaaaatgacattcttaaccattttgccttattgcaaggcatttacgtatatacattgagaagctgtatctgatcatgtttctgcagagatgtgttatgaactgctttagtacacggatttttgaatcttaacaaaggattttggccacctgcaaaataagaggttttcattctttttagaatagtcttttttctgggtccccagtgtatattttgccaaaatgcctaaaatattgcaataaaaaaactcagagtttggtaccaatctgacaattaatttttttaagcctttaaaagtatataaacaattttagccaatggacacctctcactgaattgaccatatagatcatattagtccattttcacactgctgataaagacacccttgacactaggaagaaaaagaggtttaagggactcagttccacatggctggggagacctcacaatcatggcaaaaggcaaggaggagcaagtcgcgtcttatatggatggtggcaggcaaaaagagagagcttgtgcaggggaactcctctttataaaaccatcagatcttgtgagacttattcactatcatgagaacagcacgagaaagacccaccccataattcgattgcctcccaggacacatgggaattgtgggagctacaatccaagatgagatttgggtggggacacagcctaaacatataatagacctatcagttccctacactaataaacttccctggtattatttccacagcacatgtaccctggaaaattagctccaggtgatgagaaattcagttgagggcagtaaaaaagaaaccaggtattctcacactaatttgagggtttaatctcactgggcctcctgtttgtttttagtgcattggaggaaaattagattttctgagtaaatagaaatgagcaatgttcctatgtatatacacttaactcttcaaaaagaacaacataggtctgtactggcacaagtaaaatgttgtagaaattgggtcaggtgccaagtgtgagcaacctcactctccctaatcagacagcatttcttatattatttctggattaatataagtaggtaatcttgaataaattctctagtgaatgttctacatcatttattgtcagtgaatgtacagatgggatagtcccagtaaatttttttagaaaaccaaaccatgttcaggatcatggatacttgtattcaaggttttcatgggcattcaaggaagaaagaggtgatgcaacatgccgtaagccagattctctagaaaacagacttggaggcagagatttaggcccaagaaatttgtttgggggtggggttctcttaagatcaacacctgtgtgcagtagatttctctctctttggataaaggcaattccaggagagagacttagctgagaagactcccagctgctgggggaatgaatgcctcaatcctgaatgggtatctgggttgcatatttgagcaaaacatcctaactttagtaaataaagctacagctttttcttatttctcctatctgcttcttgcctgggcaacctaaaatttatccattatccctgctatctcaccaggaagagtatagcgataaagagcaatttctatatcttatacattatatttaactataacatttattgttattagatagttagattaagtaagaaataaggtattcatgattcttttgaatctgtgtgaatatacatatagttaaatagtgacattgaaagtatggtgaatttttatatcatctttctggagaaatactgaggaaaatacttgaattttgcataaccaaggcatcagttactattcacaatgagactacagagaaagctttccaaaatgtttaaatgaaatatgctttcaatgttatgtggttttcctgtgatgtagctacttaattagcattgtatcaatcaccactgacatcaaatatgataacttgctttactggaaagtcactgctcaatctcatgaatgaaattgatgaggtagaaggtaatggtgcattgccaagaaaacaagaaagaagggagctaaaaattgagagttacctactttgcagtatctgctttatatatggtatctgatttcagtttatctgaaccctcccctggaagtagctattatcaactttatgttatttacttactcattttattctttttaaaaagaataatgagatgttttaaacatagagaaaagtgcacagggcaatataaaatcacatacataatcatctcccaagagtaactaatgtcattataggtaaagtttgcttcatatcattttaaatataaatattgcagatatgcttgaaatatatgttaggccatatgtgttcaagctgaggaaaggtaggttcagagagaaataatcttggccaatctcactctgctagtaagtagggctaagatttgatcgtctatacgtggatcgtggaactcatgttctttccctccactatgtatacttcctctgtactccctgaagacttaatctggatagagatacattgcctagagtttctctatagtgggagaaatgagccttttactttcgtggtaccacgtcagttgccaattgattctggcacataaaaatgtattatatctttacctgtttaattattttctgtaccacatcaaaggaacaagataaatttggttataatagtttattttactttaatttactattattagtcattgcagtacacaaatgcagatgtctgaagggatgcacaaagatgacaaatgaggcatgtaacatataaagaaatactacatttctaagtggtttacattatgtgtatgaacatgaattacctgcatggattatttttaagttcagaaactgtttttagttggttttctttcttttctatagctgttatttatgtctccagcttcatcttcaaagtggagatcataatatttatctcataagactcttaaaaaatgagataaaagcatttgatgaaagcatatgaaagcatttgactgagcaattagtataaagaagctacttagtacttatttgctatggtcacctgaaaagaaaagctattttgcatgcagtggtagggttgagaaacagccaatatattaaatattttaaaatatttttgtttaagttcaaccacctactttttagaaaatcacttagcatatgaaatttattttaagaggatacttactccacagttgctttagaagaaagaaaaagaaaatcagtttgtaaaatgagataattgtaagggtatctcatctttgtagccatatgagagagtccaaagagctaagcaaatatttgcgaaatgatatttttactatactggaagtaataaacaattaaaatgttgttattaaggcagtgctgatattataattttactatctctagaggaataccagagatcttattaaacacatgcttttttaaagttgaaatcttagataactattatcattactatatgtgtaagaaaacaacggcatggagaaagatgtgctctatagaaaactggtaggttattaaaatataaagaaatagggagaaaactgaaaattgcatgatattgtcaagtctcccttgggactcacccacacaacagttctttcattgcaagtttcttttttccttaatgagtcattttgagttctttttaatgtgggcacaaggaaacaaataaggattcttccatgcagctaaggcaccccaaatcttattaattcaaatgttgagagcattgaagccataaagacaataagaatactgaaacaccatgtatctgctttcatttaaatagccaaacaattctgtattttccaagtgggcttccttaatatacatattttaaaccttgtaaggtaattctccagagaaatatggaggtctaaaagacaaagtaattccatttatcaccttaaatctcatttaattagggaataattctgatatatcaagaaagaaactaattactgtcttctagatgcttgtgcttttgtaagaaacaaaagagctcaagcaagtagaagcctcaggaagagagcagtattacagagggaccacagcaacaatgtttttttttgttttttttgttttttttttttgagatggagtctcactctgtcgccaggctagagtgcagtggtgtgatcttggctcactgcaacctctgcctccagggttcaagcgattctcctgcctcagcctcctgagtactaccacactcagctaatttttgtatttttagtagagatggggtttcaccatattgtccaggatggtctctatctcttgaccgcgtgatccgccctcctcagcctcccaaagtgctgggattacaggcatgagccgtcacgcctggccaacaatccttattaatattaaaatttaaaaattggcttgaactggagaacacttcaaagctcatttaccacagaactttgtcatttttctccttatttgactcatctcagttggaaagcacagatgttttatgcgtctgccttgctcccactctccctaaaattttacttaccagctaaaccgccaatcctaatacatccaacaatattttaccatgaaaatacattcaatttttgtatttagatgcatacaagtctcctgaaattgtgaaatattccaactgtacttggaaagctctctgaagatccccccctcaaaaaaaaaaaaaagaagattatctctagtggttatattttttgaaaggtttattgttctattgaatatatatctagttctttttcataaaaatgaatatcctggctttaagtaactgtttgctaagcacagtgtgcacagctatgcacacactgatatcaccattgccaattttattaaaagaaccacaatacagagcaaagagaaaaagagaagtgtccctattaatggtatttcaaatgcgtatttaaacagcttatctactccaaactaatttctgatagattaaatagctgtattccaaatcttacaagatgcacatctctcctctatttctttctcggcttgcttcagctgaatagctcaaattgtttggcactggtaaagcatgaaaatgtgagataaaaaaggaaacgaagctacagcctgagtggcctacaggccttagaaatggcaacactttaaaattcattatattttacattgcttcaacagttacacattttttttttttttttttttttggctcttgatgatgtcagaagatttatctgggatgtctgtctccacgggtaaatagtgaccggggtgaaaactgagggaactagggagcacctagaccccaagccttagtagtcagctctggaatgctccctgcagtgtggggtgtgagtgtggtgtctctgtgtctctgtgtacacactgtgtgtctgatgtgcagaggggaaggcagggaagaaatactatggcagacagtcacttgtggtagctctctaaagggatctggcacttcctgccatttcatggaaaagaggaatgagaaggaaataagcatttgttacatgcgggatctcactggatgctttcagtgctagaagggagctatttctcctcctaacgtctgtaactcaccagatttcactaattcagaggttgctttgaaactcagagtcaaattcatagccagggactaagtcttcatgatgtgcctttttgttttagcctcctttccggcatgttttttgtgttgctctccttcctgattactttttattagtgctatcttagtttatgtatttttataaactgccttaaatgctttctggaaccactgtgcatttaatcaaatagactaataactaactaggaaaatgatagggctgatagcatcgtctgacccatgaggaagctgaatttaagtagcttgtccaaggtcactcagcaagtcccttgtgctgtgagtctggttcttggctttcagtcagtattttcaagttttacctacttatttcctcttaactgaacacgaaaaaaacctcaaatgcttatttctttagctatttctatttctctgcagttaatgtcctatcaacttgaaattcctcccctgcctttcactcccagtagaagtttcgctcacctttcccaggatgcttgaaataccttctcatgaagcatttcttatcctgaaaaagcatcattgttacatctcttcttagacgctcctttgccttctgttttcaatctagaaatttgtttctcccccatctccatactgactaggattttgtttgcttgtttcagtttagatcacaggtgttaaaaagatgatcttacatatttaaatgatggacatatgattcctattatcttctacttctatgcattcctgatagacaactcttaggctggaaactaaaacaagaaggcctattaactatttttgcaaaataaaattgtattcttaaagttaagttcttgatgcagggagaaaacattttatgattttcattttacttcccacaataatacaagcatgtcaagtattgacctacaataaatgcttaataaaaacctagtatttttcagtcactttaacagggcattgtatatttaatgcattaacgctccataggccatgtctcctatgtactttgtatgctcagaaagggaagtaatgtacactggtggttaagaacatattaacctgagtacatctttaaacctcagctccactccttgcatgttgtatgacattggcgagtcatttaacagctatgggtctacatttcttcacctgtaaaatggggataataataatgtctatttaataaatgtattgtgatagttaactgaaataaaacatgtataaagcatgcaatagggcacatgggaagtattttataagtgttgtatgttattattaacctgtaaagaattcatacaagaaggcacagaaaaacatcaattgcaactaagatgaaaagtttgttgctgttagagcaggagtagttaagatggtatgtatttcaaatatccaaaagcttcttctatttctggagagcaaccatgggaagtctattgtggcattagatagtgccacagagaaaagacaacaggatggtgaggacaggagttgggagggtggagccaaggaatcaaataatgtggtttcctagatgacattcttttcagaagcccagaggtgccacatctattacaaagtctctaaccaaaccatatccatgaacctatacaagataaattttaacagagtgcagattgtctttcactctacatcaaactatagagtccagaaaaaatattttatatcatgatagtgataataattgaaggaatcagaaggagttgatcattctctacaagcttgttgtcatgaggagggaggtgaaaagcattaaaaaaaagcttaaacccttttcccaatatttcaaagtagctttgatggtatttagatagcaaactcattttaaagagaataggattttcacaaaacggaaaaatcaagcagctggcatagtaagttatctgaatttgatctgaattgacgtcagggagctgggaatgcccctggcaatcctgcattctctctctttgtgcagtattttgacagtagtgagaatgtctgagtgttaatcattttctgacagtgtaggctctaatcttatgcaaaatgaaagcatttagagattttaccttcttggttccaatcagggcatttcttctagaaaaactattctgcagtaagattgtgtataacttattttacatttgtatatgtttatatatatttatatttatataataaacctaaaaatatgtaactgctaagtttggtagtagcctttcttcaaagcatcattcttgagaagagagtttattttgtaaaaccttactggtagagacataaatctaaaaaacaaaattcaatccagacttttgtatccaaatatgaatgttaatttcctgggtatatctttttttaaaaacttgcagtgtgggtatataagcagggccagatgtctctgtgttaatcatttctactctttaataaataacggtggcgtacagtgaaaataaagcccagatggctgacacattgcacaaatcactggatgcactgtatattcatttcatagtttcctgaatactaatagatgatagagtcatcatctttttatctgttcctcagtcaaataacaagtaactacttactgtgtcttctaaaagccactgtgctagtggctaggtaggttataaaaacccaccagatattgcagatagtaccacaatataatttgctttaatctctatgaccttcagaatctattacatcctagtcttccctaggagactggggtttcttggaattattttaaaaaagtgatccaaaactggatctgattttgccatggggattgcttaactaattggtttattagcttgagtctcatgcatcatggtggatattactggttgtcaagttgtggttggtgaatcgtagacttttagaactctcagagaaattcagagttgacccacattacattttacagatgagaaaatgtgaaacaaatgactaaatggtttcactagagccagacagttactgtcagaattgaagcttaaactacaggctgctaacttgtagtctgcagcttttgctagtatgtatgttactttgtctcagaaatgtagtgaaattaaatgtagtgagattaaaatcggtatcacaggaatgaaggtgcagtaactttgggtttgctgctgccattgactcagggtgggatgaaagaaggggaacggacatcattgcacctgcttcatttgtttgttctagaaggaaaataaggaaatgaggtctggctccacacagtgtttcagtgggggctttaactggtctagattatctagaatttttcaatatacagaacttaataggcacagacactcaaatgataggggagtcaagtattcacaaagatatgacatttacagagccagtctgcaaagataaagatatgctaagtggttgtctgtagacaattatagtccattacaagttgagcataaaaacataagcattattcatcagatactgaatcaccagttagtgctggtatttagatgaaaacatttggcttggaggggaagcccctcaaaaaccatagttttgacttgtttctaagaacctgcctgtcatggaaaagcctagaccctagtggaattccccagggatgttttacatagttgggattctcagtagttgatgatattgggaagcagaacataaccagaggagctgggagtcagccctgcccaggtggggcccaagcaaaaaccatactctgcctttccccaagtcacaataaattgtgttctgctaagttgtagttacactgtctcttcaaacagagaccataataatctttgctgcatttattcagttttatgtttatgctagtgatgtttgtcacttagttaaaattagctttaatatggaagaagagggtatacctctttctggaaatgtaacactcagccttaaaggtaaagggagcagcaaaggtgtccctaaaaagcaacttgcatcctgagcactgtgtggatagaggccactgttgccagacatccagccttagcaggttgcagccttagcaggttgtgctgtctttgtatgtggtcattttggtaccatccagaacccccacttactctcctgctcctccaccaccacctccagtccctggttgcaatgagccacacaaaacagaggaaagtaaacgggcattaccttagtatcagcaatgctgggatatagttctgctggtagctcctcctaaaaatacacccctaaaaaataaaattgtaagaaaaaaagagttaaaaataaaaagtttcagtctccttgccctgggcaggtccttggaactgtagaggattttaaaggctatgaaaattattttttatggaattccagagagggggatgggctcaagtttatatgtgagatacatatttacttatttaatagatttgaaaatttatttctatgtttattagtcagggttcttcaaaggacagaacctatatgatatatgcatacatagaaagagatttattttaaggaatttactcccacagctacagagactgagaagttccaagatctgcagccaataagctggagacccaggagagctgctggtataagttccagtctgaaagctggcaggcttgatacccaaaaggagcaaatgtttcagttcatgtccaaaggcaggaaaaaaccaacctcccagctcaggcaggcaggaggaatcctctcttacttgtggaaggttcagcctttatgttctatgcaggccttcagctgattggatgagggccatccaaatgtaggagagtaaccgctttcctcagtctaccagttcaaatgttactcttatccaaaaacaccctcacacacataccccagatgatgttaattaaatatctgggcacccagtgacccagtcaaattgacacataaaatcaatcatcccaccatgtatatttattcatatgtaaaatagtagatttatgtaggaaatagaaaaatgatggttattattagagaggagcataagaaggaaatttgtgatttgaagatttagagtccattattgctaatgaccattaagcaagaatcaaaaaattttgccctgttatgataatgatgtgtacaccattctaaaaataatccttatttactaaggcatcacaataacttctatgggtccatttcagacacaacaagggcgaatcacctttttccttttatttctttgacttctgttgaatattttttatgaaaaatcttgaatttctaagggcatattcttttatcactacagggatgattttgcctgaatatctgaaatagcattgcaaaatgattttctttagcactttacaactgtaaaagaaggtcattttaaaggcagtatttaaaagaacaatgccacaataagtggctcttctcattgcccttacattcttttaaaaagaagagaccagtagacaatggttaaaccagcatgtttcaacaaacacatcatcacttaattaattgaagcaactttccaaaagtattaaggaattaaaatatgtaatgctctagaataggagaagcctaataagccaaataagttcaactatgaaaaaatatctgtcattttgttaattcacaagctggagagggtatgaatgttaaggggatgttgtagctagcctagagacttactcttaggtctaaggcaggtacttaaaatgtgagagttgaaaagaaatttttttttattatttttcttttttcctgaagaagtgggttttgtaagcacaaaggatgtagagaaaaaccatgctttttgattcagactgcagtggggaaggtatgcaaattaacttataatttctatgccaaagatttttttttggctctttctctaaatattttactaatatcttacggcatacagattggtctcccaacttgcaggagacattttttggaggttgtatttttaatttttttttcaatactgaaaaattttataggggaaatgagaagagccagatgatgaatggcttcaacaaagggactgtggtcaataatgacagtgatgggaacaacgaaatgaccaaaggtcttgatttccaagaaaagtcaaatcatgaaggcttcatgttggaggagaccacagaagtgtggagactcaggcaggttccgggattttaaaactctaccgctggagcagcctttccttaccaccacccaaatgcacccatagagcagggaataggggtcagaaattatggagatttccacttgaagggttccatgggtctaattcaactcccattttagagatgaagcaggtgagtctcagagaagtgaatgatatattcaggacatatggctaaggggtgaccaactgcagactaggcttcttgactcgaacttttttttttttttggactacattgtattactccccagtctattaaaaagtttaactgccatattgaacaagcaagactcatacagcaaagtcagaaaacatttgcctttccctccactgtcattaaaatccaataaagagttaggtcttagcatgccaatgggactctaaaaagaaatcctctctaggattttttgtctccctttgacctcttttaaaggctgtatgtggggtataagctaacggtcagaatagctgcgcctttgcaagtcctaccagatgttgcagcaactccagagtgtaggaatatttgccatctattgttttgtccttggccttgttaggacttctactgcaaatagagacaaagagccttcaggaacattctgctgtgcaagtggtcaccaagttcatgtgcatgacactgccctggtcattgctgtcctggttactctgcaaacactaaagccgattggccttgacttaaaatccatttcaagggaggagaataacataaattgttttaatcagggcaagttttattgtaataaagtaaatgacacaaaggcaggaactacactgccctattggttattatcacctgtctggcacacagtaactgctcaataaatgaatgagtgaacagaaacctattaattggatcaagtaaaaagagacttattggaaagatacaaagtaatttaagaaaaatgtcatattggaaaataatgcctggcttcatggggtattcccatcctggcatattggacccattaacctctcagtgaatctcagtgacccaacatggccacatgccatgatgatgtgactacagtgcccatcgtgaatgaagggaagcagaagcactcttgagtggtctgggttggaccagaacctgggtgttgggtggtagtgggaaatagataagggaggtaatctgtgacattggcagatggcatttttattaaatctcagactattcagagagtacgtgggaacattatcttcattgtaatatgatcttcttgaaaggatagttattcaaataaaaatatatactttccatgtatatgaacaataatgttgcatttattctaatgttacatttattctaatgtaaactattctatcctttttgataactttgcaaactgaaaactattactgaacagtttgaattaaaaaaaaaagcttggagtactataatattcatgaacaaaaatcttggagaatttcttctttaatgaagttattgaaatgctcatgcctataaaatttttcaatattgaaaaaaaattaaaaatacaacctccaaaaaatgtctcctgtaagttgggagaccaagagaccaatctgtatgccgtaagatattagtaaaatgtttggagaaagagccaaaaaaaaatgcttggcatagaaattataagttaatgtgcatactctccccactgtagtctgaatttacaagatatatgccatgattattctctcagaagattttttatgagttcagtactgtcttgattaagcttatgactaaataaacttcttttcatgacattgtcgaagagtatcagttttcagacagtgagaaaaggacaagcagctggaatcagctgagaacccaacaatctattgtaaaaatacggtttattttaccactcggcatatgtattcatacacatatatgtatattcaactgagacaaaagtttcacaaaatcctgcttactcttactacatgtgatgatctctgatacatgtgatgatctctattctgtttgttttaaagtttgtcacaacacatgaaatttgtttcacaaccttcctgttggtcatgagctctgtttgaaatatgcagactcaaggcaaaaatgtaaatgggaaatttggaattattatccaggttggaaggattaaaaaatagaaaatacgtatgatttcacctttctttcttctgaggccagataaaggtaactagtctgaaatctagttatttatttatctggaattgtttagggttaaccatagctagtaagggtagactgtggatgtagtacagtagctacttaaaagctgttatgtcatgagcctcccaaccatgacggtgcttaggaactctccagggagcattgtaaagtatgcaaaagtcctggaaactctaggccaagtgatttagaatctctgagcatggggcctgagcatcagtatttttaagaaactccccaggtaattgtaatatgaagctaggacccaaaccatcaatagcaactctgagtagatgcctttgccttgtgcactgaatacttttgtcatgttaacaatgcttttttgtcatattttatgacgtgtttcttgtgtatcacccaaaagcaacagatatttttgaataacagaggttactatgagcatacagttatgcacatcattgaacctcaaattttaagatacttattactaaaatgttatactgtgatttattgaaaattttatgaagaattcattgacaggagcaggttatatgttaagtgctacttttctagttgaatgtggctcaggagaaatctagttaactaagtcaaatagatagtttttaatacttatatttatttaaatagtagacttccataatcctcagttattttatgtcttccaaaaccaaaaataatttctttaattttgtcatagattttaattgaaattggtgaacatatgcacacatacacaaaaactgtagatttagtgtctgtggtatgtaattgatgaactgttttctaaaaggattttgaacgtttagaaaactaattaagatatttaaattattgacaaatagaggatctttctgtacccaatttaaaaagaagatacaatgatttgtggttagtgtatccatttttcaaacataaacagaaacttcagaagttcttaaaaacaggttgtccttttagataatttctacatttcctctgaaatcttatttctgaattaagtctagatgtttacaatctatctgaaaaaagtaatgttgttataaacctcaaatccgtgctcatacaaattcttaccatttccaattagataatactctggcaagaattactaatgcctgaaaaaatagatgtaaatattcccatatgatggtaattattaaatgttatcaactaagtatagtgttttgttttaattttaacttttattttagatacagggggcacatgtgcaggtttgttacatgggtatattgtatgatgctgagatttggagtatggactctgtcacccagatagtgagcatagcatccaataagtagttttcccacccaaactctcctccctcccttccccttctagtagtctgcagtatctgttgttcccatgtttccgtccatgtgtactcggtgtttagctcccacttacaagtgagagcgtgtggtatttggttttatgttccagcattaatttgcttaggattatggcctccagttgcatccatgttgctgcagaggacatgattttgctcttttttatggctgcatagtatttcatggtgtatttgtaccacattttctttatccaaaccaccactgatagggtgggtttcatgtctttgctattgtgaacagtgtggagatgaacatatgagtgcatgtgtctttttggtggaatgatttgtattctttgggcatatacccagtaatgggattgctaggttgaatggtacctctgttttaagttctttgagaaatctccaaactacttttcacagtggctgaagtaatttacatgtccaccaacagcgtataagcagtcaatttcctccacaatcctgccagtatctgttgttttttaactttttaataatagcctaaatgtagtattttaaaatatctaagagtttcttacctgaacctagccaatgtattttttcatcttattaaattacatacacttttattttagccctcattgatttattaggtatataagtaagcatattttgtagagattctttaattttttttttttttttttttattatactctaagttttagggtacatgtgcacattgtgcaggttagttaatattttatagcactaatatgtccttttgttttttaagaataaaatttataaattgttttataagagtaaaatcaatgtaatagctgctgctgctcagtacaattaaacaagttacagaaatcctttactcagtatcactaccaaattttttctaatattctcattttaattttttgtaggtggtttttacagttgcctttatatattctgtcaattgtgaatagaaattcaaattcttgaatttgataattgtgtcatttttgtgttccctagcttttatttgtagactgttggtcctattgttctttttcatgtgttactattatctctggatattttcttataaattattgaaacttatgagattcaattaccttccaaagtgatttattgttacgtgctgtaatgctattaataagtgtagtttgcaagcaatgtttcaaaattttgtctacttaaaatttagaacaggatatttattttgtaatttttggatagatagaaaatctcctttctgccatcatgaaactgataaatgagttatagggatgggaggagatggacatttgaccacatgcaatgcagttttccaaagtatataaccataatctatattaaaggtaaatgcagtgtcagatgggcattactttatgcaagattgtgttgctcatgaacttaccagccaaaggagactatctctcactaaggcttatgtaaaactgccaggagagaataattacagtgggagtaaatttgaacacatgcagtagaatgtctaaaagttaagcttctcagagaaaatgtacatatgcttggattttacaaatgatgtatttccaggtattcactaggcctgctaaaataagttagcattttttaaagataaatatgttactgaaatatatcctacataaagtaccaaattataggtttacagtttgatgaattcctgcaaagtgaacacatctatgtaatctccatcctgatcaggaaatagaacattgtcaattctcccagaagtccctggtaccataccccagtcccctcccaccacatcacataagattaggttttgtctgttttgtttttttaccattttgtgttcttggtgagagtgctgcttttccataagcaatttcactgtatccagaaacagaactcagttaaattttaaggccactattttcttcataaaatagagggaagggagaataggttggtgggaggaaactcgtgcttctgattctttccctagcctatgatcaacataatcatgccttaagaaccttgctttctgtctttgagtgacatgcttggaaaagtttttgaaaacatcagtttgtgttctttacatattcattgtataactctattttatatggtattaataataaaatggaaacaaacagaattgtggaggggaaaaaaagagaaattttaaagacaagcctgccctctaatttcctttttgccatgagtagtcagtgggaagactctgggagcttggggacattgaggcatacagcagtcaacaagcctgagccctacaacgactgagtctggaaagtttagattctgaaagcctaaaaaagcactgtgtaagaggctaagccaacctttttgttgttgttaatctttttactgggagacaagaatggaccttagggatagggtaaaaaactgagagcccccagcccctttaagatattttctctaaacctcttaaagttaactctgattaatttcttggttagaattcaagttatggttcctgctctgcaaaactaataggtagtttaaggtgggaaaagtaaaaattcttgccatctcctacattgacttgagagtgaaagtaagactacagatttgttatccccaagacagttgtagaaaactgagattatgctttataataccctatttcaagtggggttaatatataaccatggttcttagccttatttggggttagagacccctttgagaatctgaataaagctatatgtcttctctgaaaggtgtacctaggtacacataatttagccactggccttgtccgtttgcaggccccgtaagctaatgcacagttccctctgaggatccctcagctttattctaaagtctaaaattctctaacggttgccagtggaaataatccaggagtgatagaagtatggtccttattacagttatctaggaaggagaccacactgtcttcatcctttacccttccttggtttcaccttcttccttcatgacttgaagattcctttattttctcttacttccaactcaaaattatattggttcatgctggtttcctttgtttaacagaaatattccttttgcaaaatggtaaacacctttttagggggaaaaaaaacccaaccaacactgttcctacagttgtagatagtaattaagtcaaacccttagttggttttcatttttgaatttaatactgcaaaaaattaacttttttgcataaaactttttatgacttcagttattaatattttattattttgattaattttatgtaagtcaagatagtctaggttattctgcagtaatccaaaatctaagtggcttaatataacaaattttatttcttgttctcttcatacatacccaagagggattggcaagaggctctacttattgtagtaaacctgggacccaagatgattgatgctttatctcaactcaggcttcttcaccagggaaaaatgatgtaatgaatccgtcacaggttgcctgaactttcacctagaagtgacacataccacttttgcttaaaataattggtcaaagtatatcccatgttcatgtaggataccaaaggggaggctaagggcaatcttaccatgtgaccagaaaaaggaaagctagaagtatttggtagacacattcactcttttctgtactcctttccaaattctcctaactttttggagatttgattgatgttaagcagaaaaagagggtttgagtcttatttttggtgaaagaaaatattcttggttaactttgtcatataatatatctgaacttaaaataagtacacagtggcatataatgaacttaaaagaaataaaatactagcaggaatgtaaaaaacctgaacataacactgaattgctcttgttagtgttatgccacttagttccatctacagtctagcccttgtaataacacacacaccgtgattttagttaaataggaacatgcccctttctgtttcatttaaaattctagtcaacacaaattcttctagaaaaatgaattaagaatgagtactattcccagagtacattctggtttgtctataaattctaagctaagctttatatgggaactgtcaaaggcacagttgcaatgttgctgccttttttattcaggagaactgacttctgttgtcccacttggactgatatgttgagtgatgaaaagctgggcaaatctcctcagtcactttcttctgatagtttactttatggcttccttagtggtctgcatcattctttcagcctgaccatttgcttgagggtgatgaagagtaatgatgacaggttagatgagctctagcttcacaaatttcttaaatgcatctgaaacaaatgcagattcattgtcaggaataataacatctgggaatctggacattgaaaatcattggtacagggatgttcttgttgaagtagagacactataaggcattttgagatggtagccacaacaaacaagaaattctcctccttgaaaaataaaagaattattgatcaaatcttcctgatcattttttataggaaggaaaagtacctttggtggattatatggagtggcttggtgttgtctacagtcttctaaatgacataattaagtacaggctttagatataattattagtgtatatatcattttaaaattcccaggtgaattgtaaacattattgtaataatgtgataagttatgtgatttctctattctggccactcgaaattaagaattaaagctttgattagaaattagagtctaaactatatatttgagaggcattagtatagttgaaactatgagagtattttggtttactgagctagtttatgtgagaaagcaaaagacctgaaacagtcttttttcagtatgtattgtattctagacttttttctaggtcattctttctttccatattttctcttttttttttttttttttttcatgagaaagcagaatgattcaaactgggtataactatattaaaggccatgaacctagctttgtctgacaataaaagtcatgctcttattgctagattaaacttcctcctgtttatagtgtctgatgggattaaagagagaggatcttatgtaagtaagaaagtaatctttttcctacaatctgcttttagcccttactttcctcctatgttgagagcatttctagtccaaagttcttttttttaagtcattaagatgtattattcaatctcaagtaacttttaatccctttgtaaaaatattagctctttaattaggcttggtgtgcctagccagctgtctccagcataattttgggtaggcattagtatgttaatatggaactggcttataatcttaatttcaaagcatattggaaggcaagttttatgaatagtataaagagacttatatgacctgtcaaatcaattcataaaattcctattttgaaggggaaattaaaagtcaaggtaatggaaatgttatattcgtatattcgcaggagatgaatgacatggataggatgtctttgaaagttaatgagaaagctacttgccaggcaagttgttcaagagcaatgttagcaaatgaaatgggttgctgcctttggggaaatgatttatgatgatgaaaaccatctgggtttaggaggttggttgatgtgacatacctctcttccagcctttccactctctcttctttcctgtgcccagcataaaatcagtctttgcgtataaagagcgctatgcaagttggcttccagtcatacgaatatgtggtatgatttcaaataagattgtcattggatgctttggtcagcaagcatatttactttagatttgtatttactctttgtagttgaactggctaaactctaacaaagtatgcttcatttgactttaataaaatattatatttccaagaccgtatgtagtaatagcagaaggtgtgatttctctttttgcataaattggctcttcccttctctttctctgtgtttttcacatctccctactgtcatatatattctgacctgcctctggtagggctatttatgtcatatccataattgttatatattaaccatttgaatgtggaataaggcaagtacagtttaatttttttatataaaaaatatggaatatactgtaaatgagttctcttaatcacggagtagctacctctggaagctgtaactgttggtcttgggctgtaatatattatactacaaccttaaaaatgaagaaaacaaaaagacaacactctatgtgctgctagacaaaggccacagttaaagccaaactgcttgacactttatattcttcaggcctttttaacgaccttccctttgggtgatgcattttgtagctgttgtcacttgtacagcagagagggaaaaggaaatgaataatctgatttgaaggggtgtagagggatgtgagtcttaggaagatccttaggatttacagaagctataaagctatttgtgctgctttgtggtgctttgcaccctgtgtcagttaatagtttatctttaccccattttatgctctaagatatagatgatgttttaaaaatcattctcatagtcttctttcctcaagctccaccccaagttttctagctcctgaccagcactgttagcttttttgatttaatcttcacagtcttctcatttatgaaatacaaaatgaatgctatgtcaagacagacttggaaaaatcttttaaaatggcaatacaggctcacctgcaattaaagtcattccattccatttagtgtctttttctttttctttttgagacagggcctcactctattgcccaggctggagtgcagtggcaggatcatggctcactgtagccttgacttcctgggctcaagcagtcctcctgcctctgcctccctagtagctatgaccacagatgcatgccaccattcctggctatgtattttttaatttttagtagagacagggtctcaatatgtggcctaacctggtctcaaactgctgggcttaagcaatcctcccacctcagcctcccagagtgctgggattttgggatcccaggtatgagccattgcactcggctccatttagcttctgatgagtgtaaatattaactttgaggtcagttcacagtttgctgatattaggactgattttttttaagttatatttcatttaatagtggagcaccttaggaaaaaacaaatctctttatatatagaattaaatttgtgaacttttctgaagtacatttttatccttttaaatatgccacaacatctatcctgtaagtaaaataaatatttctaaatgtctaaagcagagaaatattataaattaattaaaatatttcctgaaaaacaaagtaaatcaatttctcaatttacattattcagataaaaatagctcaagaactagctaaacagtattagtgaaattgaaggtcaagagatgctagaaattagtcaactcaggtttatggaagatcttactatatactctgtaatattcaaaactatttctcggcttaattcactgatgaaattatggtattttggtagttggaattaccaactgtctgcaacagcatgaactgacaagaaaatagtgccctctatgagtaggagtacagaatgttatcttattaacaagaaccaggggacagtaggaatggacaacagcattggttagtggcacagaccaattcaaataatatattttgtgtgattttttttttccttaccagcagtttgttggtgaggcagaattaaatagggaagagaaatgcacattccctatctctgtccctgcagtttcattaaattctgaccaaattatgtgactcagcattctcagagaatagtctctgacaggtagcacttacaggagacagacccacaccttctagcatgtgattcttaaaactctgtgtgcagactggtgcccagctaaccacataaaatttaccaggggtgcttattaaaaatggaaattccaaaatcttacctccagagatgctatcttggtgggccctgagaacatcatgtttttgacgaagtcgcccaatgcctttctggcgtggtcaaaagcaagaagcacaatgcctttttgtgcttcttggttttgaccaagtcacccagatgattgtggtgcaatgcctttttgtgcttctgcctttagcgttggtttgcccagccagcaccagatcaggcagctctattagctgctgctatcagcacgtggatgttctctcctcttcgtaaatgagatctcctctactctcccaaaagtcccatattcttttgggactctttcttttgttagctcttgcttgtcaagaatggaatggggaaatcatttcctatggaggaagtttttctttggcttttggtaactgacagagtgaacagatttcttcgctgggtatgcactgtgccttctcccacctattccagagctgtcactcaggagcactgttcaaggccatcccctgccttccttgtgtagagggctttctgtgaccagcagacagtcaaagacatcgtatctatacacagatggcacattgatgaaaactactgatgtttgccacttattatttattcttttttcctaaatatttacaaaaattacttttctcttttgtatgccacatctgactatgtgtgttagtttttgttttttgtttgtttgtttgtttgttttttgagatggagtctcactctgtcaaccaggctggagtgcggtggcgtgatctcagctcactgcaaggtccgtctccttggttcatgccattctcctgcctcaacctcccaagtagctgggactacaggcacccgctaccacgccctgctaatttttttgtatttttagtagagacagagtttcactgtgttagccaggacggtctcgatctcctgacctcgtgatccacccacctctgcctcccaaagtgctgggattacaagcatgagccaccgcacctggccgtgtgttagtttttatatctatgttagtaccgcaaaaatgtctaagaaagcagacccttctaccaacactacaatgtctcatattgcaggaggcctcatagttaggaagacaactgttagcaaagcccttgtttctctcatgagccaccagtgtctggcatatctcaatgcactcttcatgatgctctaagctctaagttaggcctatggttgcattgaagctctaagttaggcctatgattaaagtcttctggctcataatgataaaagccattattgtaggcagttagaacctgttgaaggacagagacgtgatggattacagtctgagataatgtaagttgtttaaaaaagtgaaaataaaagaaaatcaaaactttgctttacctattcatttttaaaataaccaaggcataccccttttgctgtcttaagtttcagacaagggtgcaacttctacagtcattccttggtggctttacatgctttatttgccatgggccattaggtgctatgggtgttttcatccccactttggtgctttgtcaagacatcaagcatctccatgaatatactttaatctttcccttttttgtgttttgttttttaggtaagtacttttggtattcttcttccttaatgctgaaagaaaatgcagctgcctgatgtagaacaaatggcttttgaaagcaaaatccaaaagataaaaaataatgtgaacagtaaagaatgacaccataccagatactggtaagaattttaagtggcattcaaacacccctctctttttggagagaggactaacagtacaggaagatgcggggagggtggggagggattgttgccgtgcaagtaaaaagaaaattacagacagtgttcatgaaatattcatttacacctgcttattggttagatgaacagcctttggttctgagctggctcaccattcccaggctggaaattattcacttaaatgcagcttttaaacattttcttaaaatcctcaatggaaacagatgtgcacatgctgagggaacttttttttgatctttttctagaagagggttaaattagaaaaaaaaaccagtatttttaatatttaatttcatgtgtatagctatgaagctatatacttaaatgctttgtaacatatgatcatgaatatatgtataaacttcacccagaaaaatccataaagcttttgacaataaatgtgtataatctggataaatgaaataccagtgaactcaaacataatttatttcatgttttatgtcttctctttctcattttccatgtacaattcctgtgtacatatgaaataacatacaaaatacaattgtacgtatgcttcaatggcattttgcccaaattcatagtccttttttatatggccgtggatttcgagatttaaacatatatggtaaatagtatgtttctgttaacttcagcatagcccttttagtaacaagacattgtttactataaattgagattatctatccaatgtgagtaaatatattattaaaaatacattaacatttaagatgaacaaatagcaaaggttaaaaggtttcagagaccattacctgttactaaatcatttctctctcccatttactagtcttatctcattgagtttcctgctgtcctagaatgtcatccctctgtctctgctttatttagtttttgtctatattcaactcagaccctatatcatgtacaaagctttcctcaagtctttgaacacagactggtttattcctgccctaaaatcattttttaatagaatccatgtgttaattttctgaggctgccataacaaagtgccacagactgcaagcgtaaatagtaggaattgatttactgatagttctggaggctggaagtctgaagtcaagagagcagggttggtttcttctgaggcctctctcctcagcttgtagatggctgacttctctctattccttcacggggtctttcctctgtatgtgtctgtgtccttagctcctcttataacaacgtcacatttgattagggcccacacttatgacctcaacttaatcacctcctttaaaccctgtctccaaatatagtcatattctgaggtacgaggacttcaacgtacaaattttggaggtatatgtacgaggacttcaatgtatgaattttgggtataggattcaccccgtaacagcccatgttagtttctcacttcattattctctgattcttccatgtatattggttctatcttccctaacaagttcatcaaggataaggattgatcatatttcaagttttgtttacttcattcacagttcctagagggctggcatataatattaaatgctacatatttgttgtttgaaattactggaaaaagtagcataacaggaccaaatgagagcctctttttccaattattgctgactttagctcccttatctggacagaaaaaaacagtagcagaggtttgagtcaggcagtggtcaaatgaactgtctctgctttctttctgggaggcccaacagcattctcgtcagcaggagcattctggcgaaaggaaatgctgatctctgcaaatgggcaaaagtgtaaagagcattgaacccagcctcataccacagaaaacaatttgggcttgtggaaaataattacccagtgaagagtcttctgaactagaggcaggtttttggagggggaaatcataaacacatttgtggttgcaaggtagcagattgggtgagctgaaactaaaacaaattttggtttaagaaattgtattttaagttctgaagtcatacttaattcttaataattctaattgtacacacgctaatttaaatggaagatgtttacttcattaaaatttcaacactaaaatgctggttcagtttgttgtattactttcttcaggttttgttatattctatttttcataatttctagagccagcattcaaaagtaatttctgtgcttcaaaataggatcatcctaaattcaaattatatgtaaatgtcattgaatgcagatataaacatggtgccacaattttatagaaaattctaaaaaaacaaaacaaaacagaataaccatgttgctctcgtaccaaacgtgtctttgggtgggttactaagtccacctgagtctgagattctccatctgtaaaaaaggaatcagaatacctactttgggcagttgctgatattaaatttaaataagcaaagcagttagcccagtcatgtcaaaatagttgagcccaatgaatggtctttttctttatctctcttcaggttgaattttgcacagtagataatccatctatcacagaggtgtgcagatgtgactgattcattgattgaaacattcattgccccatttaaacaatgtttaggtattattatccactgtatcctggtttcatgctggatgttgggtaaataatgatgagaagaaacagacaactccaactttaatggagaaattgacattaaaagtctaaaaatatgtataaaattttaaaaaatcagtgttgtgtagtaaatatacacagtaccaggagattttataacagggagggtatgtgtaaaatgtcaggaaatatttctcctaggatgtaacaatgaggagagtttcagagtatgcatgtgtgcacatatgtgtatgtgcacatgtatggatatgtgttccaaaagtaatagtggttaaggtggtgatggtagtggtggtgtaggtggtgatggtggtaggagaagcaagagaatgaaataaataaaaagatgagtgtctgggaacagcatgtgcaaagtcctgatgtaggaaacagtactgaatggacagtacggtttaccaagggagggctggtgaggctgagatgaagagagctaacaggaagccagtaacttgagatgaggctagagaggagagcagaggccaactggagcaaaaccttatagacatattaggtcttctaccctaagaacaatgggaagccacctaattttaagagaaagcttaatggatgtgtgtgattcagtgcagggactgctaccgctcttaatcctcgaaatatcctgctaaccaggttggctttagtgggtggaaaagtgaggcccatacatattcaaatttgtattttgaaaagattttttttttgtcctccaatgcttttgccagaatatagaaattcaaagtatgtgtatttatagcaaatacgtagatgtttttcaccttataggtgtgtttttatcacattatttttgcacatatgattcctgcatgacccgagtgaaggggtgggttgcccctccacacctgtgggtgtttctcattaggtggaacgagagacttggaaaagaaaaagacacagagacaaagtatagagaaagaaataaggggacccagggaaccagcgttcagcgtatggaggatcccgccagcctctgagttcccttagtatttattgatcattcgtgggtgtttctctgagagggggatgtgtcagggtcacaaggcaatagtggggagagggtcagcagacaaacacgtgaacaaaggtctttgcatcatagacaaggtaaagaatcaagtgctgtgcttttagatatgcatacacataaacatctcaatgctttacaaagcagtattgctgcccgcatgtcccacctccagccttaaggcggtttttccctatctcagtagatggaacgtacaatcgggttttatagtgagacattccattgcccagggaggggcaggagacagatgccttcctcttgtctcaactgcaagaggcatgccttcctcttatactaatcctcctcagcacagaccctttacgggtgtcgggctgggggacggtcaggtctttcccttcccacgaggccatatttcagactatcacatggggagaaaccttgaacaatacctggctttcctaggcagaggtccctgcagccttccgcagtttttgtgtccctgggtacttgagattagggagtggtgatgactcttaaggagcatgctgccttcaagcatctgtttaacaaagcacatcttgcacaacccttaatccattcaaccctgagtttgacacagcacatatttcagagagcacggggttgggggtaaggtcacagattaacagaatctcaaggcagaagaatttttcttagtgcagaacaaaatggagtctcctatgtctacttctttctacacagacacagtgacaatctgatctctcttgcttttccccacacccgagatcttttaatattctaacatactcttatgttctaaatcagtgacacttagaaagaaatgttgacttgaacatccaagtacaggtgctaatttgacctagcagaaacattttttaaggaaatctctctgcactgagcacttgcattatctagcaatggaaaattcaaacaatagaatgattatcataaattcctttgaatacctttgttagcagagatgaaaccttggccacctggctttaagggaaagcttaatgagcatgtgattcagtgcggggactgttacctctcttaatcctagaaacatcatgggaaccaggtttgcatcagtaatgaatttttataatgtgaatctttgattttctttcgctggtaagaaaccttatttggagatgctatgtatgtgagtttaatctcattttccattccttcttgaagctttctaggttaaccacctgaaacagtggttactataatcagtaaagatttataaccaaagtataaggaattggggaatttccatatggtgtgtcctcacaaacaaacgtcatgtttcaatatgatatgaatgcatctccatccaaattattattttaactgtatatttttccctcagtcagcaatttatgtaacacatatatttcatttcatccaactcctaataagagacccctaaattaaccttgaactatgatttacaccttctcaatatacagtcaataattgaatttaatgactaaccaaggacattttagtcattgcaactgcttacaagattatatgtaaaggattcaggaataaatagaggggtctctcagtatgaagtttaaataaatacttaatgataaaagaaaaatttgtctgcagtttttttttttacaattaactttttacaagttattatccccttaggctcattccattctgctccctttgttttgaaacactgttatgacatactactgtcagtaatggaatgtcagaaaatagtacatatgaaagacacagttcattctactgttaaatattacatcattgaagggtttaaatcctaagacgtatctttgatttaccagcccagcccaacttcctatttgctctctgctccatttagtagatttcatgctggttgctggactaaacaagtcaaacacctgcaagggccctccatctgtggccagaaaagtgttgctggtggtatatttttgatgtttaggaagaaatattgatctgcttaactaagatggtcataagataatatggggttgtactcatctgattctcacaaaaccccagggtgctcagaactatactgatgtgttggagatgctacttaggaaattagaggaccagcatgcatgtcctttggaatgatgtatgccaccctatcatctgcttggccaacaacttgagccaagacacacctggggtatcttggtactacctagagaccctagctaattttgccagggtggattggtagaatccaaggaaatagttttgcaagtgacacaattggtggatgatataataagataatgaagactaaaataatttgaagaagggaaatggagataatttaggctaagttgttctatttgctattcttagaagtgttttcttcacatttagaagaagaacaattgattataaaatcactgctttgatgcattaatttgatcattctaaacaggtgatgaatattgtcttatgttatttgcctccattacttaatctgactatcatagaatagctaagaatacttcttaagaatgagagtttgcaactaccagtcacataggccagtatctgttaacaaaatgctagtaattttgttcattaaattttaaacattaaatctattattgcattaagacctattaaaatggacaataagtaagggccagatatatcatgagtagaaggagtccctttctactgagagcctatggaaaggacaactagattccagaaaaatctgttcaacttccaggatggcatactaggagaaataaattgggggtctaaagagtaataagcaggaaaaaaatctggttttctttgaggcaatgattagttgaagcctacacaaataaaccaattacaacattttgactgaactgagaataattacactggtagtcaactcctggggaaaaattatgaagttcaggctgtaagctgtctaggcttttattaacttgcattgttcttaactgattacaggcaaaaaggtcaaaacattttggcctacctaggtagccagatggtctagagataatttcttaattaccaaatgactgtgttttatagtgtcccttaggaaaccaagttttaaaactgtgtctaaagagaacctgatttaattttttgatgtttcttttatttttgcttgattatatattataatcattttgtaaaaaaaaatccaaacactacagaaatataacttggatgtttataatcttcgcttctctcttagataactatttctaagagtttttgtatacatatttagatttttgatacatgtaaatatatataatcttttttactaaaatggtaatttacaacatgcttttaaacaaacttttttttttacctaaaatttcttagctatttatgtcagtacatgttgctctatgaagttgtaaacagaacaaagcagcgtgctccccaagaggactcttagatatttgaaagtagcccataatggtaaagtaaattcattcctgactttgcttgaggaaactaacatcctctccatcctgccttgaggacaagtgtgttccttcatggctgacacatatcttggcagagcacatgtgctgcaacagcacacagtatggggtaggaacaggatttgagtgatttactaatcaagtgttggctagaagagaggagacttgtaccaccccgaccctgcatcatgcctcttgctctcctctttagggtgaatgtaaaggggaatctgcccagttggggtacagataaaccttttggttaccagactgttggggtttagatgtcaactctttataggaattgtctaggaaagtcagctgtccaggcttggagaccttaaggaagcatggaaagctgcagctccctttttccaggaaaaggcagtcacccgtcttcttggaagctgtatttcagggaggcctctccagatgggctgggggacactgccaactgttagcatattgtccagacgacccagcatgagctatctaggtcatgttcagacagtaccactcatggtgttctcttgcttaaatcattgttcctgagtagccttgaatagtaacaaatgtgatatcttgacatcatctggtggttgggtgacaactgtttaattttctaacacagttggtttctgcaatgccttttcccaagtaatttagtattgtcttatcctgctatgtcttccacaaagggaagatgataaaatctttttaattagcataatgtttgtctactttaattttacattaaaaatttgttatacttttattaaaatactttcacagtaaagttttaatccattttcctatggatttttcattttgtaatatttctttcccatttataatcatataacatatacatttaataaaagtatatacaatatatatcaagcatatatggtatatatactataattttgtctgttttctactttctttctacttatgtctattttctgtattttttccatatggacatcatttttcacatttaatgtcttcttaacattacagggcagttctaattgttagaaggcctccttatactgatggctagtttgactcattataaagtcagttattgttcttggttttatgtcttaacaaggcatcccctcctcgaaccttagaggaattgatatctgacttcacatgctctaggggatgccatgtaaaattttgtagaaatgtttagtattctggcatgtgtgtctctaactttgtcagatgattagagatctgtgattagttaacaaccacacaggactgaattagcttccttccgtaactaaaagaattgaacagattgagtaaattaagtggatgcctcattagctccacaaagtttattagaattagagtcaaaatctaatacagggctttggactactaatatctgctagctacctttgggatgatttcagtatcataggatcatctgaccaaacaagctgtctcaaattcctgttagagtgaaaccttggctggacattagcttcacctgggtaatattaaaatactgatacctggccccagcctggagagattttgattctattaaattgccagagttagggttcaaggcaaggtacatccagagttgacaaccactggatttgaagccaaaatgtatagaatgtgaaacaggtaagcactgttggaactaccgagatagagacaaacacattccaggcactagcctctgcttctgtcttttctgatgtaagaatatttcgcctctcagaaagttgcttcccaaatgaatacttttaaaaattaacctggttttttcagtacataagacagggtaaggagaaaaagttcacctggtttttaaaaacactattgtttaaactttaacagaattatcttctcaaaatacttagaaatggagtaaatgtttctgctttgataacactgaaaccaaagctagagagtacagttaaaagggccattaaaaacagtttttattctataaaaataaattaatcatcgaatattcattataaattcaatcatgaaggaaaatacacattaaattatttatactaagataaatataaacctctattggcaaacaacttcgtagttaatttttctaatttaccactttctgcatctcatgcaaattatgtcttcttgcattgccaataaaatatgagattggggaaggatgctgcaatatccatgagaaagtttcatgtaagtgcaagcaatcagatttcattgcagatccagagtagtaacactgacagaactatgtcagttaagctttctgcattatttttatgcgttgtcattttcttttggcagaggagagattgaggatttacctggtccagaaatcgttgtaggttaacaaggtaccaatctgggtttgtttttatccccttgcttaaccaatcgtacagttaattcccaaaatgtgttattttttaacatgcaaagcagttcaacaacgatagaaggtgtagggattccagccacagacagagcctgagagaacaaacaaagcagattcagaaagcaggcaagtagcgcctactttgtttcagtggtatgtcctctgcagttcaaaatccttcagtatctcttaattaattcatagactatttccagtgaggtttcactgagaattccttaatgtcaagagctctctctgtatcttaagcagttagtgtcattgaaatttacttatgcaatgattctttcaccaaatatgtattgaaggcttatgatgtgcaagacatgtcccaagttctggtaatacaatgatgaacaaaattaatagtttctttctacacagtttttggtttatcaaatttattacatgtttaataaatgttcattaagtgcataaatagtaaaagaatcaaagatgtgatttcagcactatgtatcaaaaccacagaatggctgagtgttctttttaaatccatgtatcatagtgtattagaaggcaaaataataagaaagcagatcagaagtcaatatggtccagtaacaagaataaggagtcagattagagtcacattaacggttcacattttcctagctgtgggactgtaggtcgttattttcttgtcttattttgtctttctgtttttctttctttcttttctttttctttttttttagacagagtttcactcttgttgcccaggctggaatgcaatggcacaaactcagctcactgcaaactccgtttcctgggttcaagcgattttcctgcctcagcctcccaaagtagctgggattacaagcgcccaccaccatgcccagccatttttattttgtatttttacttgagatggggtttcaccatgttggccaggctggtcttgagcttctgacctcaggtgatccacctgcctcggcctcccaaagtgctgggattacagacgtgaattctataggtctcatttgcaccatctgcaaatgtgaacaatggtattgtgttcatttacccattcagccaacttttcctgaacatctcttaagtatagggttcagagatatggtaggttgggtttcagatgaccaaaataaagtgaatattccaataaagtgagtcacacacattttggttttccagtacatacaaaagttatgtttacactatagtctattaagtattcaatagcatgtctagaagacaacgtgcataccttaattttaaaatattgccttgctaaaaagtgcttatgatcatctgagccttcagcaagtagtaatctttttgctggtgggaagtcttgccttgacgttgatggctactgattgatcagggtggcggttgctgaaggtcagagaagctgtagcaatttcttaaaaccaggcaacaataaagtttaccacatttattgacttttctcttcataaaagacttctctgcaacatgtaatatactgtttgataggattttaccgaatgtagaactttcaaaattggagacaatcctctgaaacccaactgctgctgtatcagctaagtttatataatattttaaatcttttattgtcatttcaacaatttttatagcatctttaccattagtagatttcatcttgagaaaccactttctttgctcatctataagaagtaactgctcatctctttgttgctgagattgcagcaattcagtcacatcttcaggctccacttccaatgcttgttctcttgctatttctaccatatctgcagttaattccttcacttgaacccttcaaagttatccatgagggttggaatcaacttttctcaaactcctggtaatgttgatattttgacctcctcccatgaatcatgaatgttcttaatggcatctagaatggtgactcctatccagatttttaattttctttatccatatacatcagaagaatcactgtagaaagtagccttcccaaatgtatttcttaaataataagacttgaaatactctttgaatcatggctgcagaaagaatgttgtgttaagcataaaaacaacatgaatcttgtgtattgtattagtctgttttcatgctgttgataaagaaatacccgagactgggaagaaaaagaggtttaatggactcagctccacatggctaggaaggactcacagtcatggcggagggcaaggaggagcaagtcacatcttacatggatggcagcaagcaaagagagagcttgtgcagggaaactcccatttttaaagccatcagatcttatgagactcatttactatcaggagaatagcacaggaaagagctgcccccataattgaatcacctcccactgggtttcccccacgacacatgggaattgttggagttataattcaggatgagatttggatggggacacagccaaaccatatcattccacccctggtacctcccaaatctcatatcctcacatttcaaaaccaatcatgcctccccaacagtctcccaaagtcttaactcatttcagcattatctcaaaagtccacagtcctacatctcatctgagacaaggggagtcccttctacctatgagcctgtaaaatcaaaagtaagttagttacttcctagatacaatgggggtacaggcattgggtaaataccattccaaatggaagaaattggccaaaacaaaggggccataggccccatgcaagtccaaaatccagcagggcagtcaaatcttaaagctccaaaatgatctcctttaactccatgtctcacatttgggtcatgttaacgcaaagggtgggttcccatggtcttgggcggctccacccctgtggctctgcagggtgcagcctccttcctggctgttttcacaggctggtgttgagtgtctgctgcttttccacacatggcgcaaactgtcagtggacctaccattctggcatctggaggatggtagccctcttctaacagctccactagacagtgccctagtagggactctgtgtgggggctccaaccccacatttcccttccacagtgccatagcagaggttctccatgagggccctgccactgcagcaaacttttgcctgagcatcctggcatttccatacatcctatgaaatctaggcagaggttcccaaacctcaattcttgacttctgtgcacctgcaggctcaacaccacatggaagttgccaagcttggggtttgcaccctctgaatccatggcctgagctgtaccttggccacttttagtcacagctgaagtggctgggacacagggcaccaagtccctagcctgtacacagcatggtgaccctgggcctgacccatgaaaccatttttttcctcctaggcctccaggcctgtgatgagaggggctgccatgaagacctcagacatgctctggagacattttcctcgttgtcttggggttaacaattggttccccgttacttgtgcagatttctgcagctggcttgaatttctccacagaaaatgggattttcttttctatcgcattgtcaggctgcaaattttccaaacttttgtgctctgcttcccttataaaactgaatgcctttaacggcacccaagtcacctcttgaatgctttgctgcttagaaatttcttccaccaaataccctaagtcacctccctcaagttcaaagttccacagatctctagggcaggggtaaaatgccagcagtctgtttgctaaaacataacaagagtcacttttgctccagttcccaaaaagttcctcatctccatctgagaccacctcagcctggaccttattgttcatatcactgtcagcatttttgtcaaagccactcaacatgtctctaggaagtttcaaactttcccacattttcctgtcttcttctaagccctcctaactgttccaacctctgcctgttatccagttccaaagtcacttccacactttcaggtatcttttcggcactgcaccactctactggtaccagtttactctattagtctgttttcatgctcctgataaagacatacctgagactggggagaaaaagaggtttaataggcttacaattccacagggctggggaggcctcacaatcatggcggaaggctaggaggagcaagtcacgtcttacatggatggcggcaggcaaagagagagcttatgcagggaaacttctgtttttaaaaccatcagattttgtaagactcatttactatcatgagaatgctgcaggaaagacctgtcccccataattcaatcacctcctaccaggtttctcccacgacatgtgggaattgtgggagttacaatcaagatgagatttgggtggcgacacagccaaaccatatcatgtatccatcagaactcttggatgaccaggtgcactgtcaatgagcagtaatatatttttaaaaatctttatataagagcagtagttctcaacagtgtgcttaaaatatctagtaaatcatgctgtcaacagatgtgctgccatctaggctttgctgtttcaggcacaagcacaggcagaatagatttggtgtaattctgaatggccccaggattattagactggtaaatgaacattggcttcaacttaaagccctcagctgcattagcccctaacaagaggatcagcctgtcttttgaatctttgaagccaaacattgacttattctttctagttgtgaaagtgctaaatggcatcttcttccaataaaagtttgttttgtctacatttgaaatttgttgtttaatgtagtttcaatgatcttctggataacttcctatagctttgatatcagcacttgctgcttcactttgcatttttgtgttgtggagatggcattttccttaaacctcatgagacagtctctgctggcttcaaccttttcttctgcagcttcctcatctctatcaatctttatagaattgaagagagttaaggccttgttctgaattaggcttttcttaagggaatgttgtggctggtttgatcttctatccagactactcaaactttctccacttcagcaacaaggctgtttcaatttcttatcatttgtattcactggagtagcactttttatttccttcaagaatattacttttgcattcacaacttggctgtttggtacaagaggcctagctttctgtctgtcttgacttttgacatgccttactaagcaagcttaatcttttctagctttttatttaaagtaagagatgtgctgctcttcacctcacttgaacacttagaggtcattgtattaattgacctaatctcaatattgctgtgtctcagggatggggaggactgaggagaaagagagagatagggaatggccagttggtggagcagtcagaacacccattaattgagtttgccatcttatataggcatggcttatggtactcctaaacaattacaatagtaacatcaacaatcagcaattacagatcaccataataggtattaaaataattttaaaagtttgaaatattgcaagaattatcaaaatgtgatacagagacatgaagtgagcacatgctgttagaaaaatggtacccatagacttgctctacacaaggttgccacaaaccattttgttaaaaaaaaaaaaaaagccatctctgcaaagcacaacaaaacaaagcacaataaaatgagatatgcctgtttcagtcactttgctatttaaaagagaaaatctgttaagccatagtccttgtcctcatgattcttacagtttggactggaagaaaatctttaggagtaaagacattaaatgtgatgaatgtttttgtgttggccttttacctatttattctcagaccacatattgccctttctctgccctttatagttggaggctacgctctgaaggctgtggtctcaagacttccatgtcctttgttagatagatgtagcacattggaggcactggtggacatttggggagaggcagaaagagagaagccagagtgttttactctctctacctgaggcagcacctcaggcagtagctgtgtctcctccatggcttcacccttagctaggtgaccctaatccttgcatacatcagccctcctttttagctctagtccaggggcggtagttgcttcctgttgtttctaacccctaagttgcctcacagtcccctatttggcatttcaactcttccatcaccagtgcaatgaatcagatctattaaatacactacttttaaaatgcatagagtgtttcttttagcttagtcggaagctgtttgataaagccttgataggagtggcagaggcggatcttatgttagaagtagtcaatgaaggtttactgagaaagtaaaatttaggctaaaacctcaagtgtgaatataaatgtatcaatggagaggggaagaatattctagatcagaagtgtccaatcttctgtcttccctgggccacaatggaagaattgtcttgggctacacagaaaatacactaacaatagctgatgaactaaaaaaaagaatcacaaacaaaaaatctcaatgttttaagaaagtttaccagtttgtgttgggccacattcaaggccgtcctgggcctcatggattggacaaggtttttctagatcatgtgcaatgggaaggaaaatgaggcatattttagaaactaaagatgtagacaactggaatgtgacatacaagagaaagaaggtcaagaatgtttgagggctgtcaagctcattggaagacattacagtggaatgacatgggcatttgtgttttttaaagtcagtggctgcattgtatagaattacttgggatgcaagcagggaaccatttagaagattattacagacagcggtgttggtatggagcagaatgatagcagaggcaatggaggaaagtgagcttatctgagagatagaggtaggaggtggagtctgcatgtcttggtaattgagagactctgtgaaacaagattgaggaaagggttaggattattttcaggattcaaaacagagcaactgggtagctgaggttctaatcacagtgagaaggaatattggagaaggaagagttccatggttgaacttcaggtatatgtcggttatccccagggagagctgtccaggagtcaggtgcgctgtatgtgtctggagctcaggaggcagatgcagaccaaagaaattgatggggagctatccatctacagatggtcatagaagttatttgagtcaataaaatcaactaaagggggtgcaagattaggagaacaagagagtcctgtctcaagcctaagaactgccaatatttgaagacaaagctgaaatgaaagacatgaacagagacttaagaagaaaaccaagaaagttaggtgctatggaagccaaaggaaaggagtgtttcagaaaggagggagtggccaatagcttcagaaatgttcattggtttagtgaaacacaagtcagttggtgacccaatgggagaaatttccatatagtaggagcataaaccagattgaagtgggttgaggtgtaagtacaaagggagaatcaagatagtgaatataaacaaaattatttcaagaaattatgctcagagtgaggaggaggtaagaagtatctggatagggaagtaggaattgagagggatcttattttgtacagtgaaaaataagtgcttatggaaaagatttggtaaagaggaggaaaagagtaagggaaaaatggatgaagctgcgtatcagagaatgtgagaaggacaaagaaccaaagcacaggtggaaggatttgcccgagttggtaacaggagggaaaatggaaatgatgactgtgggagtagatgtgtttgtcattttgatggctggacatggagaatgttcctttttgatggttactattttctctttgagtaggaatatcatctgctgtgtgtgggaagtggggactcaagtatttgagaagaaagaagaaggacgtttgctgtagtctttgcagaaaatgaaagtgatttgattaatagttgttagaatttaaaaatgtgtgcacagtgtttgggttaaagttgtttttaaaaaaccagccaccttgccttttattctttatgctgtgaaacctctttagagcactcagtcaccttttggccactagatggacacagtgtactcagtgctaaactgctgacccaccaggttccttttgttaccagccaatactgacagagtgattgagttgtgaacttattgttatgaattgaaacttattttagagaaaaaatcttaaataacacattccatcttacttatagttcataggtcagagaaagactgtggtgctacaaaaacattagccaatatattatttgctttcacgctaagtgtaatgtgtgtaacatgctatctctttgaaattttttgccttaaaaatgctaatcagttggcacaaggcgatcatttacatagtcagaatagagcttttggtttagcattttatcttaaaataaggcagaaatggcattgctctggatgtcagtatggtgcattataacccaagtggtggaaaaataactgctaaatggcaaacacatagaaactgaattctgctagtcagcttccatttggtagagatatgtgtgcccttgggtagctgcaatgttagctattattaatagttcaaatctttgcttcataaaagttctgcatatagtgttgtacaaattgaagtgattcaaggaaatcatagttctgtggagcttcctccctgttttgtagtggagattgggaatgggggtggaccataaagtaggtggttttttttttcctgccactcttaactaattacacaccctgccatatcccccaccaacataagacttcagactgagaaaacctacataatttaaccaatgttagaatataggcatttttaacgtgctgaaaacagtgttgttcttttggttcctaaactaaaatcatttgatacatttctctgtcctatgaaggaagccatgaatgctatgagtaaagatatttgtggcaggtaagaagagggagttaagtaagggagtttaatatgaaaaattcatataaaggctccaaggttaaataaggaatacttttgcacaatgggttcaaggttttactgggtagagcatttttaaagttttataacgacgttagaaggaatcgatttgggagaaaaactatatctgcttaatgtgagggagcactgtggaaaatttccagcacaaacttttcctgggcctcaacatttcttggtaatgaacctagatttggagtgatcaaataatttgctgtctcaagtagtaaaagggggactattactaacttcacaagaagacaggcataaacccagcaacatgtacaaagcaggatgatctcaggtaactcaggaagatgctggaacactctgggtgaagggcattaatgctgttcacagtggaacacaggactgctaatggtatttttatgcttttatgcatcaaaagcattgttctttgatttgtaatctctcacatatgtgaagcagggcctttcaatctggatttggggtcagaagacaacatgtggatgggaggcagaaaattataacagactcacctggggagcagttttttgttgttgttgatattccctagctgctgggaatggtggctcactcctgtaatcccagtgctttgggaggccaaggcgggaggatcacttgagcccagaagttcaagactagcctaggcaacttagcaagaccccatctctacaaaatttaaaaaaatattagctgggcatggtggcatacacctgtagtatcagctactcaggaggctgaaatgggaggatcgtgtgagtcctgaagtcaaggttgcagcgattgtgccactgcactctagcctggatgtccttccacctcccccgccaaaaagggatattccaaaactacaacattctactacattattctacattcttcctttttactctccatattgatacagaaacaaaacaaaacacatttgagacttaccactgcaaaagagtgttctttgaattgtggctgcaattatttctgttgcaaactttagtgtattattgttataatgatacttgaagtaatacccagatgtattgaaaattcaaaagacttcattgccagctcaacctgcactctcaagcactgcttactaagggagtaacaatgggaagagacaggtgtgagaacagaccccagagccagggaaatgaacatggagaagggaaataggcaaaatctcctcatcagtgtggttgagggaatattggggcatggcatggagagtcccacctcacttggcagccagagaatcttaaagcttattgtcaaaaaccttatgaaaggttagagaaggtaccattttattttacaaaatactttagcctttaccagctcaacatccgtgtgtcagcctgctttgaataaagaaatacacgtcttcttaaaatctgcccctgactacgatgagcttctttgtttcagcttattttgactaattaggctgaggttacaaaccaccctgatatttcagttgctacagccacagtcttatttcttgctctcattacttgttcttggctggatgatattgatatgttcgttttgttctggaaccaaccctaaatgagctgcccatcctgagaaggcagaagaaattgggagatggcaggggcacacagtgattttttaaaacttctgtttagaaatgccacagatctcttccatgcacatgccattggccaaagtgggttgcaagatcagcttggtgtcagtggggcaggaagtataatcctggcacaataatgggcttggaaagctgttaaacatttttacaataacacaatcagattctttcaaattaattacaaaagtacttaaagttttttacatacattctgtgcactgtcccaaagctatatctaatgttacttcctcattccgatgaattactattccttttcttcttagctgtgtttaaaagcccatacatctatcctgtgataatttgtacactgtattgtgcttggtttacttgtctctctccttccctcagtggtgggcccttggagggcaggagcaatgtgatattcatccatgagacccaagtgtgtgattggtgcacaatggacaccctaaaaagtgtttattgataattaatgaattaatagctaaatgagggagtgttttctttaccttccctacactcaccttttctccattccagcaagcaatcttgcacatggagtagaaatcacagtggaatcttgaagaataactagaaggttaccagatgagaaagtacagggaggtaaatcagggaagaacagctgatagattcagttgtagccatgttgagtgaaggtaagattcttggattttgcttcatgaactcgaaagtctacataacatcaatcttggccactgccaagtctgacccatctcacagcaccagaggattggggtagtaaactgcagatgtagcacccacaggctgaccagtctgaccctcattaggttccccaaaaatcaaatctctaatgcacctgcatggatgctgcaaaggaatgtgcactaaaggaatgtgaaagcgataactatttttcattatttctgatgagacattttagcaattatgttaaaatctgcacaaccaaaaagtctaaacagagcgtgaacctctgacattgactctggaaattacacacattttgttttactattttaaaaacacacatgaaccgaagagaaaagaggcagaaagactggctagaacacagcagaacttacccattaatgtaatggagtttgagcctttctcaatgatgcctgtggggagctccgtactagtaatatctcaaggatattgccattgttcaaacatttcagggattcccctcttgaacttaccttcaaaagagcctttgctacatgtttttgaaattcattgatgacaaatctccatctgttgaaggtttatctagttctatgaagctgccaaaagtcctttggcattaagcctgatgattaaagttgatgatccagttagcgaatgctattttgagtcaaaatgagaagtaactataaaattaagaggcagttttcttatgcacactggaagtgccctgtaatgataattcccaaagagaatgtcaaaaatgtctttaatcctaatagaattcactatatttttttcattgaaataaatatttaggaaacattggtttgaatttgcatatggtatacatgtttgaagaatcactcttgttactatataggtaacacttataagtgttaaaattatcaagttacttaagtacttataatgaatataaataaaatgatccattgatatttgtctatatatttttatacataaaagattgtatatgttatataatatatgtgtatacatatagcacaatgaccaaattaaattgtctttgcagctatttttaattaaaacattttcacattacgctttcttaaacaattgcctctgttatatcagaagccaaaactggcaaattatattagctcagttatttagttactggggactctatctttaaaccaaccatgggaattcatttatagctactcaacactcaggtatgtatgaccatggggcagacaaaagactgctttaaaaatcactgatgtgtatcatgctttttcttcttctttagtatttctagccatcaaaaagaaattatattgtgaggcagatggcagtaatatatttttcaaaagtgaattatatcctgtttccccatataggtaggtaaataaataaataaataaattctatataagcaacatgacataattcccagactatgaatttctgctaatctgaagcatttgattaagactggatttaaactatgcttacaagttgccggaaactactcaaaaaggctacattctgttaactgtgttatttttgtctgtattatgtcaaataattttgactaaatcattggtattatcaaggtcatgtagaagtcttcttaaattctgattaaataatcgactttctttacaactacagacaaattgcaacagaatctgtattttcaggcagttcagcctgcatagggtcaatttaataccatataaatgttgggaacagaattatcagaaacttcagatatgtcaccataagccagatgaacaatatatgtcagtaccattgggggagtatttgccagcataaactggatatgtttcttgaatgcatgaaaaatgtggtactgaatgattcttccttcactaaaattgacttatttatcttgatttaaatataggcatacattggtaaataaaacctaggttttttcataatatattagagaatttttgatacataacaaatgaggtaattccagatcgattggaattcaggtttagtgcttcgtaaagagttgaaaatagttcctggtaggtaagtaaattgtggtgggaaggacaggacattctctaaaagtgcttggttttagagatgttttggttaagagtttgaccaggtggtagcagatttactttttcctaactcagttttacttgaaaggccttcagattaaatacttacagaaccaggaagaaatgtatctgagttacagaacttgaatggggattgtcaaactggagaatgcttgccccatctgaaggagatagctggcaatatgtagggaggggaactctaggtatttttgtttgtttgtttgtttgtttttgaggcggactctcgctgtcacccaggctggagtgcagtggggcgatctcggctcactgcaagctccgcctcccaggttcatgccattctcctgcctcagcctccggagtagctgggactacaggcacctgacatcacgcccggctaattttttgtgtttttagtagagacggggtttcaccgtgttagccaggatggtctcgttctcctgacctcgtgatccgcccgcctcggcctcccaaagtgctgagattacaggcgtgagccaccgcgcccgactgggaactgaaggttttaaacctcctaaacattcaaaagaagcccaaatctcaactttaatgtgacattttctgtgtgctttaaatgttggatcaaaaggaaaaacaaaattaaaaatatgttggacaaactcaggcctgctgtccatatttgatccaaggaggaccaatttacccactctatcctacacctttcaggtcatagcattttcctttgttatctttcggcattaatgtcatattccaatttttccatatctatgagcaaggcccaaggtctgtagccaagcccagggtttgcatgtgatatctttagaaaaaccccagagaagctttctcttgttttctcactatgctgtaagtatgaatagcccaaagcaaaaaagacaagtaccctgactatcatgatcttctaagtattcatggagctcgctaaaattatagttccctgtgaagagcgtgtcgttgcagaaaagcactggagagtgggcttagataccttcctgtttgatctcaatagtttaatgtttactagctcactgagaagagactgccaccttagtgttaccctcttgtaccaccctaaacaagtcatttatttctcttgttttctctctttaaaaaaatttccatatgaaattctgtgattttttttcccctcattacctattttctatcatcattgtatccaaaaggtcaagagagagaaaaggccacttctccattgactggttatctcttagactgtatgacagcaaaaatataagcaagggttaaatttcaaatgcatccactctgctcatacacatttgtgatttaaaaaacacacttcattgaataatttaaaatatggttgtaccatctgttcttgtggggattaacattgttcatgatggcaaaataatcacgttaaataaattctagatactgcactcttattattaataatagcaatgatattgttagttcagatgacccggccttttctgtctccatataatcacactattgattttccagtattggaaaggagaacgagagagtacatgcttttatttctaaatggaacatgctgttcaggaattctgccatttcttttatggaaataaaaaataaagtgcaaacatatgccatctttgaaggtaacattatgtaagcctttgagtataacatttgctgtctttatctatttctttgtgtctattcataagaaaaatgatcagattgtcaaattcatattctagaaactacgcaatcaattttttttcaggcattctgtcgtctgcctggaatgagattagcaaaagagtcgttgtgtaaactgaattagtttacttcatgcgagcattgattttacattccctgaactcttataacattttatgtttgagccacacagtaggtactatctcacattgactgagaatttattgtgtttaagtcatttcttctaaaaagtattgtaagctttgtgaggacaggggccattttatttttctcttgtatctgttgaaatttcccactctgctgggtttttctaaggtcaaaataaattagaattaagtgattgactttttaatgttgtatagtggtgggaaaaggttaaaaagagttgcttttcgtagcaagatggtatgggccaatgacttctaccaacacctaattcggtgatataaatgatatactcttagcttgggcttttcctctgtgaacttctatggcaattgggtgtggacaaatgggtccttgaagatattttgaaaatttccccaacaagaacccagtgcttaatgaccctctactgccaggtaaccttcctaggttgctgcacctattccctctgcttttctttaaaatcacatacttttatatttcctaagagaaggtagaatgtaataggcatcattaatttttgcagaaagtctccaaaacatgttgttaaatcaccgctgtcttcttacctccaggcaaaaaggtaccaacttatttaaatatttgttcactcacattatgtgctcctgtgaattttctctgggtgtcactcttcacagtgagtatgagctctcatttaatctctttcaagggaaaatgagctcaaagaccctgatgttgcaacttgacctccttgagtttgtattaagctgttaacttgctgatttgtccctagtttatctattatgaaaacttggatgttgtcaaaccacattttcattccccagtctgtgttcactatttgatgttccccacaagttacactgccttggtctcaactaaattggttttctatattacaaagtcaatttaatatctgaatgatcttccaagatactgcctataatttcttttacttctctctcacaaagccttatctttcattaataaaaaatggtcccaaagcccattgttatcatttgcatttcccactttacacaaaactagccataatctcactatcacttgtctggtaactcaggaatatgctgtataaatagtgtattttttattttggtaaaatatttgcaaaagtatcttgtggtagctataatggatgtgtgaattggataaaaatactattaagtgtgttttttcctagttgaacaacatagataaagaatactgagtaaagactaaatatttgcctggatggaagaccgttcatccaatcaaacaaatatacagaaacataaagagatagtaaatacactggaatgcaaagtcagagtcaatagttatttaagcttgctaataaaaatgactgcaatttcaagtgcacagttaattagaattggatggtagaggcccaagggtgatggcatgtaaatgaagaatatgtgaggaattctgtcttaagccttattcatagatgtacagcagagaaattaagctgactgacattctgtgccctgcaatcgtcatatcacacctggggtgtgggattcatttcagataccacaggttaagaggaaatcaacaaggagcaatcagtccagaagggtgttgccaggatggtgaagcatctgggaatcatgatgtcttcggaactgccaaaagaaccgagactgatgtggcctggaaaagggagagaataaaaactcctgtttagataatctgaggttttcatattaaaaagattcagggccaggtgcagtggctcacgcctgtaatcgcagcactttgggaggccaaggcaggtgtatcgctggagtccaggagttcaggaccagcctgggcaacatggtgaatcactgtctctcctaaaaatttttaaaaaattagcttgtgcagtggcccatacctgtaattccagctactcaggaggctgagctgggaggattgctggagcccaggctgtggaggctgcaatgagccgagatcacactactgcacttctgcctgggtgacagagtgagaccctgcttctaaataaataaataagactcaggcttgtttttgaatgactatgatcaaagaatagcacttttagaaaggtgaaatttagtttgatacaaagaacttttcaatatttaaatcttcaaacttttcaatatttaaattttcgatatttaaatctgctcaaagataagcatttaaatctgctcaaagataagcataccatgaagcagggctcctcatgccagaaccagatatttgtttttccttcaaggctgttcatgcattaggggaagactgaatttcccatggcttctaatgaaccttttaactatgaggatctgttacatgaaaattttttttttcaagatggagtttcgcatttgttgcccaggctggagtgcagtggtgcaacctcggctcaccacaacctccgcctcccaggttcaagcaattctcctgcctcagcctcctgaatagctggcattagaggcatacaccactatgcacagctaattttgtattttcagtagagatggggtttccccatgttggtcaggatggtcttgaactcccaacctcagatgatctgcccgcctcagcctccccaagtgctgggattataggtgtgagccaccgcgaccagtgttacatgaaaaattcttagaatagtgcttgatggcaccaagtaaatgttcaatagatattagttgtaattgttatcagtagtgactattctatgcatttgtaactgattattttttggatgggaataagtaaaggtgtttaaaatgttagcaccggtttctgttgctaaataattaaggtagttagtaaggtcttaggctacttgtaactaatttactcttaatttgtcaccactttatgttttccattattgcctttacattctatgttacctagatttgggattaattcatcaaatttaatatgaaaactttaagtgactgctaaatcacaattgcatatattaaattatctagtgataacgtagcaatagtctatcaagaaaggaatgaatcatgaccgaaaaaatgaatctctttcattaattaagagagatgtttcagtttagaaacttacagaatcttaatggttaagctctaggtgacgttagcttcattggattattttctcaggtgacagatttgctacatcttaggatggcagctaatatctattgaaggtattcattcattcactcacttcctaatttatttaacaagcagtgtaccaaccactgcccatgcctgcacctagctgcttacctctacagagtgttttctacccttttatccctttttgagtcagtcatcacaggaagaccagcctctcagtcatcctatgtcccctatatcccaaccccaagggctccatggcagcaaagcagtccctcttctcaccccatccctgaactccttgggctccttccctgctgtattttcctctgtatcagttatcatttctcttatatattttacttactatgtccatttacctatctctactggaatgtcagctccataaaggcaggaatatttgcatgtgttctatttgctactgggtacccagagcctagaatagtaacttgataaatatttgttgaatgagtgaataaggcctaagtgtcatggaaactgataccagaaaggtgttatttcttccccagggttaccgaagccatttatggcagcgcagcattgtgacccaaagtcacttggctctgaaaccaacatccccattcttttttttttttttttttttgacagagtcttgctctgtcacccaggttggagtgcagtggcacgatcttcactcactgcaacctctggctcccagggttcaagcaattctcctgcctcagcctccgaggtagctgggattacaggtgtgtgccaccatgcacagctaatttttgtatttttggtagagacgaggtttcaccatggtggtcaagctggtctcgaattcctgacctcaagtaatccacccacgtcggcttcccaaagtgctgggattacagatgtgagccactgcacccagccccaacatattcattcttgatctctccctgcaagcaaataactttgaaattatgctgaataaactcagggatctagagatatttgacaatgacaatgatatttcactgctgtatggatttaaatacaaggagacaacttttgtatcatttacatttaggagaacattcaggtcaatatttgcctgcctaatttatctccatgtggatcacttttgtttcttttctagatgtattcaatctgatttagtttattatgagtttctctattatttgtttttttttccttggatcattgatgcagaccctagaagaggtggagtacagaaatagatttggagaagcaataatgagtaagcctcagtctttgcctctgagatgcattcagaagtggttgaggcaacattgtaagtgtgcagttccagagccagaagataaccagataatttataatccaagcaataatattgcaaaagtaaaaggaggcactatttaatcatcattccagggcaatagctgtatactattcagacaaactgaagagtaaagtcccctagtttaaaaactcgacaaacgtaaaatatgcttgcacatctttttagtaataaatatttaccttgcatctactattttcagagacacatactaggcactgtagcaatatatatagaacagtgtacagggcactgtggtgaatttaaagacaagtcatatatcttcctatcttgtggttcagaattcactttaggacagagaacattaaaaatacaataaaaagcagtaaatgatggtgcaagctgaattaagcttgatgtgatgttagccagccacaaggtttccaacagaattactgatatgatttggctgtgtacccacccatatctcatcttgaatcctagttcccattgaattatagttcatttctataattcctatagttccaattttatagttcagccaacaatccccatgtgttgtgggagggacccggtgggaggtaactgaatcataggagcagtttcccccatgcagctgtcgtgatagtgagtttctcatgagatctgctggttttataagcttctagtgtttcccctgctggcactcattctctctcctgccaccctgtgaagaggtgccttctgccatgattgtaagtttcctgaggcttccccagccatgcaaaactgtgagtcaattaaacctcttttctttataaattacccagtctcaggcatttcttcatagcagcatgagaacagactaatacgctgatgctgtaccacttttatttctatctcataatattgtcaattgaaatcagtcctgtcttgatgcatgaattgcacatcaaatgaattgtatgctttttttttttcctagataggagttatgccatctacttcttgtgtgtatacatagtacatgctcaattaatgctggctggctggttggggtagaaaaatgaattgatagatttaaaaaagtcatctggcaaccaaatatagagccttgtttgccaaagacccctcctctttgctgaactagctagttgacagagtaagaacttgcagcatgattattttttatcttacaactttataatgatacatttggttatttggaaataagtttaaagtgttttaattctttccactggttcctactgttggaaattcttttgcagctgaatattggcaaccgtttgtatcttggcaagtagactatgctttttaaggatgaaagtgtgggaagtagtataggacatctgtcgaagaagtcatgttgtcaaagcctgttgtgtatattaaactcatttgtttccatttctatacattctaaagcaaaatgccactccatttaacattcaaacagcttataaagagcttggaaatatgaattgtgtgggcctacctgaaatttcaatgaatgagcatcattttattcagttggttttgttgctgctttagctcagcctaaactttggatatataataggtttgttgagataagattaccagtagctaagggcttttgttggatgggagaattgaaaccagcataatttccggtacctgttaaatggcacttggaccaggcctaatttactgtccttgtatttaacaaagcagaacaaacaaaacttacttagatacctgattcactaacttcctcttctaaggtatccgtccatgtggttttctcctttacttaagtaggtttaataaacttgcctttatgtgaccaacgggtttctgttgggttttggaggcaatgacagttaatagtaaaataatattttgagagaaaccgctctcaaagaggctccattagctggagaataaagcatttttaaaaagatgagaccttatgcttcattcatctcaaacttacctgcttataaaaacaaaacagttgattgatttgatcaaaagttatccttgttataaaattaagtgggcctgctgactagctgatttatgggattttatgttctttaacttcgaagaagacatacaattcagtctcaacagtttttacaatctgagagattaggtcatgctaataaaatttctgagaaactacttatccatctgaatgttaacatcttttactagaatagtatgtttgtttcagttgatgaagacttttgtttggatgtaagctttcaactcatttagataaataccaaggaagtttttcaatatcattattttaatggattcatgatattcacattgattggctattccttattttaagtagttgggcattaaagatatttacatctttttattattttgtaagacactgtgatgaccttcatgatagttaaatcttcatttgcactgttatttccttctgactgtagccattgtgtgtaagactgcaaagtgtaatatatgcagtgtttaagagtagattaacaagaaaagctaatgtatgaacataagtagctgacccttaatagaagagtgtttaattaattttgaatttgccagtacactctcaaaacacagagcttgattaaataatggcattatactgagcttattcaagtatttggataacttttctttactgaactgaaactgatagcccaggcaggcacatctccaacacctctaattaaaatccacattcatcccttgcttcctgagaaaagatgttgctctcatgttcctttgggcactctttgcaaagtatttctgtttgattgcatatgatgaatagctccactacttccaatgtatttcagttgtcaaatatttataattattattcttgggaaagtaactgagaagggagttcaggaaagacttggacagttctttggagcatcaggaccttacaatttcagctatcttgttcaataagcaaatgttgttttaggttcctggattacaaggtcaaagaaggcagaattcctgccctcaagaaaagtcatggggaagagttgtaaatgcatgaacagctatgaaacagtgtggtaaagtcatgtgagttggcaaaatagatgagaggcttctaagtaaaactgaggaatgaagaatgttttttggaagagattacgcttaaaaggaattagccagccagagaagaaagagaaaaatgttcttgccagagtacctatcatttgggaagccccagtgggccagaagaacagactgtgtacaggaaagacactaccaagtgttatttgtggctgatacaggagaggaagggagagcaaaacaatagagcatctctgtgctgagtattggaatttaaattttgaacttcattactaaataatgtggaactattggataatttcaagcaaaggactcacatgttcatgtccttgcatgagtttgctaagatttccattttaagataatcttggtaggtaagtgaaggatagatttgaggaggaaaaaatggaaatattaactctaggcaaaacatagggggaaagataattgagagagattaaagaatgtgtagagaggtagaagatatagtctggtctctggaatcagatgaattggttcctaactctgactccaccacttaacactctatgtgaccttgggtatatatcttatccctcagtgtcttgtttttctcatctgaaaaatgagtataataatagggcccaactcatattttatgagaattagtcaacctgccaaccacagtgcctagcacattgaatgcatctgatcagtgttagctattatctattgactattaatattattgttactatcaatagtattcatgtctctagggtttgtgacctgattagcagttattgtctggttattggctgaatggtggccagtactagggaatataagaagaaatgtggggagagggagtggaggaggggaggaacacagttgatttgaattacattataaatgctcaaatgaactagctatggaacttacaagtggaattttctcatgtgcagctgatggtaacagcagaaaaatgtgaactctgaataaagaggtgggagtttttcagcacataaagaatatttaaagccaattcattggatgcattgaccagtaagtgtagagatcaaaatcaagaacaactccaagaattgagagcagatgcaaaccccaatttttgtgggtctccagtccaggtatgagcagaaaacacgagggttggggagggaaggagtcttccaagccataagccaggggaaatcgttcagtcaattcttatgctctgatgtggtcattaacagatgataacctcatcctaaagatgagacttctttaggaacatcctaaagatgagacttctttaggaacatcctaaagatgagacttctttaggaacatcctaaagatgagacttctttaggaacatcctaaagatgagacttctttaggaacatcctaaagatgagacttctttaggaacatcctaaagatgagacttctttaggaacatcctaaagatgagacttctttaggaacatcctaaagatgagacttctttaggaacatcctaaagatgagacttctttaggaacatcctaaagatgagacttctttaggaacatcctaaagaagttcctccagcatttaaaattgctaaacgtaggccagggtagagttaaaggctgaaagaaccttaattaatatgtattattccagttattagaagaaaagtcctatggattgaaattgctgcttgctggcaattacttttaattgctgtgcagggcattattaacgttgcaacgtctagcatagtgatgaaaattgatgttccagatgctttcatgtgagttctccttttcttttaatgttctcaagagcatagaatcatggggatgataagtgagatttttgctagactctatacctgtcttccatagaaatcccagtatgcaaaaacaaacaaaacatagatgggtaatcatggccattccttaataagatttgagccttatttggaggtaggcctggtatggatggtagctctaatctttagatgaaattaaactctccaatgtgttcttattttcctaaagatcaagtccccaactacctctctccagccccagagaaagggaattgttgacgatagaaagattccattttcttcccttaagggccacctcctgctagttggccagagttctcacagactctgaattcttggcaggctggagtttaacagtaatcctctctcatccaaatttaagtacaggtaatccccaggagcccctgccaggcttttggtaaataattacctgggtacaagcaaaaatgcccctgctaagaaaactctggaattttacccatcataggacacataggtctctaccatagaggtttatatcttattcttcaatttctgattgttacccctcctaggaaattcttatgtgaagcaaatcttattctcttctactgggcaatctcctaaattagctggcatgtgaaaatgcttcattgagcttttgttcttcagactctcaaatgaaggagtatgtccaaagagcctctttatgcaaaatctacaaattacaccccagtcatacatcacaattagttggcagtcattaggcattacatccatattgtaaaattagtgatgtttctcccaaattatgaaatattattcccattaagaaaaatatactgaagagtaaaaacataacagaatttttgctatatttattctcttcataattatgcaaattaataaaaattatttactatttactaactttgcattgagtgttctctcattctgatgagactccagacttctgccttttgtacacctgtgcaaagcctttctaagctgtttatttatgtcccaatatatatttcagttcagaaaggctgttcttacttttgcgacaccttaatagtagttttatttcatcaaggaactgtatgcaatcactggatatttcagagagctgcctaccttattttcatactataaagaaataaacttgaataacaatggatagtcttggcaggagtgtggaggagttgacatcttccaacatgactgtgggaatatgaactgccatagcctattaaagggaaaaatgttcacaatttgtaagctagcaatccattttcagaaatacaagcaccaatcagtaagaatatattagcaaatgtgtttattgtttatatgagtccaaaattatatgtccgtcaataaaggactcattgaataaataatggtacatttatgccatggaatcttatataactattgaaaagaactcactaggtctctgtgcattcacaaaaataattttttcatgattgacttaatattaataaaggattatacatagtatgagcccactttattcaaaaaggaaggagaatccctatacatgtgtgagggtttgtgtattgtgtgtggtatatttatatttgtataaataaaaagtttgctgtcttttccctcccattaatcctaccaaggaagggaaaagacagcaatcttttttatcttcacatttctgtgtcatttggcatgttaaaaaaatagcatgtataattttgtaattgaaacctaaaatataagaaagaaaattattgaatagaaatggtaaatactatgcagccataaaaaagaatgagagcgtgtcttttgcagggacatggatggaactggaggctattatccttagcaaactaacacaagaacagaaaaccaaatgccacatgatctcacttacaagtgggagataaatgatgagaactcatgaacacaaggaaggacacagaccctggggtctacttgagggtgaaggtgggaggagggagagaagcagaaaaggtaactattgggtactgggtttaatatctggatgatgaaataatctgtacaacaaacccccatggcacaagtttacctatgtaacaaaccttcacatctacccccaaacctaaaatacaagatttaaaaaaaaggaaaattatctactctttcaaacttaaaatttctggattttaacagtgtctgctgtttaaacccaaacagtgtctgaatttggctactgaagaataaaatgtagccctttttcagcacactgtatgtttacccaggtcccaggatgcttaaataaactggcgtgtctattcaaatcctggataagaaataatttttcaaaataaaaattatctcacagaatactctgaacacctgctactctcattaccctgaacacttgtggttttgttgctataactctagcaaatggcataaaggctagaaaaactgtgggataaagatacagcatttctctaagaccctgctgccttcagtagaattatttaatatcctttctaatttctccaacttatttttcactgttatgaaaaaacagcttacaaagaattagtaacattcactatcaatgattccatagatcttcgttcaaagtgcaggtagaaggtgcatttctcaaagagtgttttaaacgaggaaaaaaaatgtgtatcatcatcaacgttttagtgaataaagacattgcttaccgtttttatgttcctgagaggctaagttcagttctatcatgaatagtaatttatgaataagaacccacaatttttttaccagagaattggaaaaccgcccataacatttccatatacccatctcattttctaagtatctataacagtttagtgaacaatattccctcttcgaaaatatagcaaataattatttccttcctatcagatatgcatgctttgtttacaggtaaataactctgattaccaaactactattacattaggttgatgttcttttcaacgttagacaaaaatggataaaaccttgctgcctactcagagatttggtctgagtggaaataggcttttgtggagctacagaatttctgctttatctactcagccaataattggtcagagcatgagcctggttagaaataagcaaaaagcttcttgtatccatgaacagaatgaacagaaaacaaggtagtacatttagcctccgagaaacacgcgtttacttttgaagcaaagaagcaccgggcaaccagtgagcagcatatgtctgaaatctattatctgacatgttctttccagccttcccaggaatgctggtctgactactcagatttgcttttacttcttgccttttggatataatgagtttgccaagcagctgtgagtacctgactctggggaaggtggctagattccgaagcgcttatgttcatggatcaccatacgcgatcaacatgccaattgatattaagccacagaggagacggtaactgctttcctttcctctagttgtttgtcagtgaaaatgtgttttgttgccctttggtaactgctttggatgtctgctgaaatgggagggtcagggtgagaagttagtttttattcaacacactggatagttgggaaaaaaattaaccagagaggaaagctggaaatagtttagctatttagcaaaagctgatctggtttcaaggtctgtagattttaagaatttgagagattgtcagtgcttgtattgccatcaaaatcacccatgatgagaatttgaaagaggatttagccaaataatggatatatttattgatggctatatggctgtttataccagatgcccagtaactcataatctacatgtgacattccttaatgcatcataacacattaatgcaataaatgagttataattctacaaaaacatttgttttcctgtagttgctagggagggaagaacaaggttatgtatttttcctataaaaaagttgtcattttagatctgtgttctacccccgacccaccctttttatgtagtatcagaatagcgatgatatagttaactaatatgtccaaaagtcacccctcaattttggttttatacaacgtcattttcttcagcaattaacaatgaacttcagaagcatttataaagatgttccattctctctgtgaaaattccatttctccctaattttatgaatccacataatgaaaatccaaaattctaaaagcaatgtattttacttggaaactgtcattactatcttactcttctacttttctttttctaattatatctacacaaactcacaaagcatgcattttgccagatttcaccttattataaacatgaagggatgtttaagtgattaaaaagtttctaaaccttcagaaagctttctgatttttgtgagacaatattttattcttttctccagagtatcaaggcttttctgtccagctctatcactatttgactttatgaccggctagcagcaccaagcaactattttaaaatacattcagaaaagtgtgtcctaagacacccaacatggctcagttgctgtcagttacctcattcccttctttagttggtgggacgatactacaaatccatacaagttgcaaaatccacatgaatatctaatgtccctgttcatattaccttaatttttctgctttaaagtaatcaactttttgtacaagtcagtcaaattatgtttttatgtatattgtgtatatgcatagacccagaaaatttcagacatatacctatttaggcttaaaattgggcatcacagtgtattttacaagaaaatatatttgaaaggcattttacaataattagtatttaattgtataggtcttgggatttgtaaaaataccagatccatcttttctttcagtagaatacattacttacctatggctagtaaatcaattaaataaattttatataaaaagttaacttattacatctggagctttcattctacgaaaggataaatatgacaacaaacatgtaatgaaaacaatagttagaggggtggatgaatgaatggaagaacatccaaatcatagaggttgtctttttattctgttactcattttcttaagttgtaaattttaaaacctcaacttcttttgaatctgttgagaaaacaatacacttggaatggtgagtcatcatcttagattcactaaaatctacctaagttttgaatggttctttttcagaatgcttgctgggactaagatttatctaaagtagcatgtttatgtttattttcatatcatctcggttgtggtttttggcagaaagaaaattgttttctaattacttaaaaaaatctgaggaaggaaggatggaagggagggagggaaagacatctaaagaagagtagctatgagttgatatttcagcctacccaaagaagcagagattgcgggacaaaaaataaaagataaaaaaaattggcttttcacgaaaatccatagagaaaatgaagtaggaaatcaaatgcataagtgcaaaacatagctcgatttaaagctaagtatatccttataaaataatgacttcttgaaagaacagcatgtttttcttggaaaacagggaaataattcccaaattattagaaaatcacctagattagacacatgaccacatgatcatttaattggtctcaatttttatttcaagagcagcaatgaagacatcaagaaagcagttaacatactaaatcttaagtaaactcaatgttgacgagaatgacaaccctaccatctgtgattataattactttctatatttgcgatttaaaaatgttttccttttaatttttggtagcctctgtaaattgtactgtcccactttttcttttgtaagaaatataattttctttcaattttatgaagcttttatgtctcaattttagtatagcaatttcttttttttttttttttttgagacagggtctgtgtctgttggccagactggagtgcagtagcaatcatagatcagggcagcctagaactcctgggctcaaatgatccacttcagcttaccaagtagttgaggtcactgtgccaggctaatttttttgtttgtttttagagagactgggtcttgctgtgttgcccaggctcttctcaaacagttggcctcaaatgaccctcctgccttggcctcccaaagtgctgggattacaggcatgagcaatcaagcctggcccttcatacagagatttaaaaatcagatttaatctggctcttctaacccatcctcacccaattggactgtaaagtttttgagtgtgtggatcacgtcttggttgttgttacttccccagtgtccagcatagagcccagaacaggttaaataataaatgtttgtttaataaataaatgattagaaaatgcatggtacatattttggcataggggcgtgtgtgtgtgtgtgtgtgtgtgtgtgtgtgtgtgtgtgtgtgtgtataaaatcacttccctgtatgccacagtatggagtctttggcaagatttttgcttctgttattcatttggatcaattaaattccctttccttgtttccctgtagaaactgcatgtagcactgactttagattactggcttaagtggttggggatcatgcattttgtcattaccaggtcagcaaaggagaacctgaaataattcacttctgtattcataaaagtatatatttgtatatatgtaatgtgtgtgtgtgtgtgtgtgtgtgtgtgtgtgtgtgtgtgtgtgtgtgtgtatagcttcaagttgtagaaaggaggagaaaaagtcactgtgggaggtggcagaggggaatttcctagagggaaacaatactgcaactgtaagaaaatgtaagaaatttgatagaagcacaaaatttcataaaatcagttataaaaattatgacatataagccccagttctgttgtcttgctataatgtaaaagtcacatttttttttaatcaaaatggaaaataaaaactagtagcagtgaatgtggtgagacagtagccactggcaccccaaggcaatggaaagcaagtgcccttgagcactacttttcacagccgggtgtcatgttttacctcacccagccgccttcttccctgcattttggtggcttgacaccattactgtcggggcagggtggggtggtaggggggtgcttgtgggagtgctggtgagggtccttcccttgctgcctgctctgtgctccctctttctggtgatgcagctgttctggtatactctctggcctctgtttttctaaatcctttaggtaggcttgctctccctattatcgctgggatcagaaaaaaagcagggtacgaagatccagaagacaggaaggaatacagtaagtgtgagtgaaggtaaaccagcctgctctcttcttgtggaacgatcacaaggtcatgcacttagatttatgaccaatcatcaagctattaatttactcaaatggtgtattaatttgttaggacggtcataagaaaatactacagatttggtggcttaaacagcagaaatttgttttctcacaattccaaaagctgtgaaatccaaggtcaaggtgtcagcaggtctggcttctccttaggactctggttgtcttgcagatggccaccttctcactgtgttatctcatggcctttcctctgtgcgcaggcatcgctgggatctctgtatgtgtcaaaatttcctgcttttataaggacatcagtcagactggattaaggcccaccctaaaggcttatttaaattttaatctcctctttagtggtcctatctccaaatatagtctcattctgagatactggtatttagggcttcagcatacaaattttggggtagacacaattcagcccataacaaattgtgctcatgaaatgatttactaataatgattgtggagagagatagtaatccgactgtgaatcctgaataattagtggcttcatgttcataaaagtggactcaataatgggcatgaacctgcacgagggaggcattgcggagaagaatacgtcccattttctgtaccaaagaaaaacaagtacacattgcaaacaataaatctttatcaaattcaaccaccttattttgaactctataatcattcaaacgtggcctagactaacatttgcttttttatagcttttatcaagaggagtggaggtattaaaattattattgaggggtgtagtgattttcaactgacgcaattctaccctccacctctcatgcaggggacatttggcaatgtctagggactttttttattgtaataagtgggaagtagctgatgatttcaagtaggtaaagaatagggatgttaaatctcctataatacacacgacagcctctcacaacaaaaaattatttgacccagaatgtcagtagtgctaaggtggaaaaaaccttatgtgaatcaattaaatcagggagaacttcagagcttttttaagacctttatttatatctagatgattgatattttttaggtattcatgaaaatactttcttttacctttcttgtggtaagcacaagataacactttcttgcctggttaaaaatggacaactgctacacttttaaaataatataaagcattcagtaattcaaaccatcctgtcttctgatttgtctgaattagtgtggctttactgcattttcagggcttattattctttcagtagggagactactaagatttcattaaagatagctgaataaatgatcaaatacattattgtagctccagactaggtaataaacattgagatatgcttttcaagtagtggtgaaaatactaggcaaaattacacatacacttacatatattaagcgaccatcctgttggcctggtatgtgaagctctgctgaactcttgcctaaatgcatggacccatcgattgtgaatgtgtgactacttgtgtgttttcatcataaccagctcatcctaatagcaaatgatatggtttggctgtgtccccacccacatctcatctttaattatagttcccttaatctccacatgctgtgggagggaccctagtagcaggtaattgaatcatgggggcagtttccccatgctgctctcgtgatagtgagtgagtactctgaaatctgatggttttataagcatctggcatttcccctgttggcactctttctccttcctgctgccctgtgaagaagatgcctttcttcccctttgctttccaccatgattgtaagtttccagagaccttcccagccatgtggaactgtgagtcagttaaccatcctttctatataaattacccagtattggatatttttcatagcagcatgagaacagacgaatacagcaaagaacacgttttatgaaggaaaaactttgaaaacaaagggactactttctttgatgagaggcccttcctttcactttaaacaaaacttcaaattatcctcagaatttgttctaattctccctacttctgggtaaaaattattagcagtaacagatttaacttgaatgtatatctccagttccccattctcttctctatgtagtgctgccaaactcaatagatttgaaacaaaaattacccagggaccttccccatctcccatgtccttttttcttatggcccagacctggaagtcctcctaagtgcttcctctccctcagcctaaccactctaccactatccagttgcaggtacactcttcctccttcacctcaccctttgatgccatctccactgctaccatcttgggtccaaccctcatgttatcttgcctgaaaaccgctaactttataactagtctctgttctatcaacatcctcttcctgactgtcatccacagatccactttctaaaatgccatcatgacgcttccatgcttataccactagcttttcagtggctaccaaaaaaaaaaaaaaaggttacattcccagccatcatgatctattcccttccacatctctgcatccttgtaaattgcccttgtcacccatgtatactgtgtattttaggtataaataactactagctatacctattttttgcctagagttccattctctcctcattttgtgatgaatcccatcattccacagatctttcctagaagacctttcataattttctatttccaaatggaagtgcctccttaactagctgtttttcttttcttctgtgtctgttactgcactatcataataaatcttaatttatatattttctatctttcctcctccctaagagtggcatgatggaaagagttgtttcagaaaaaatttggcaatggaatgctgcattaattggaatggaaaagaatgaatccctacaccaacagaaggaagcagtgtgaaatcctgacagggacaatttcattacaattacaaaatacataaatatgtgattacaattgtgagaactgctcaaaaggaaacaaggacccagtgagagtataaaaataagtacctaacatagtctgagtgtttggagaatgcttccctggggatgatgaggcctgaggatgagtaacaacatactctgctgagaaccacatgaatgaagccctgatgtgttaaactaaaaggataaggtgtctgaagtgtaatgaggcagagaggagagtggcaaaaataaactggagaagatgagtaggggagactactgttttcttacatgctaattaacccaataattctttatttcattttggagagaaacaagtgattatttattaatttattcattggcaatgcaatttaaaaacatattctttgtgtcttatttatcattgaggtttttaaaacattgaaataaacaataggtaatattttccaactgagatttaaaaaagaaaaaggtcagttttcaaatctattcccaactgctagagtttaataaaaactgtcataaatgttgacctttgttctgcaatcagttcagcatttatccatcacccaaccatgcagcctctcgcttgccaaaaggagtggaatgagaattgttagagtacttggaatgtttactgtcagcaaagtacaagacactacacaatcttgatgacctttatatgatagtcccatttctatatccaataagagacattaaattacttaataattctttggaactttctttttagtttttcatggctttgctcttaagttgaagaaaattattacatggatgaactacaaacggaaagcttctgttatcaccttttatcgtactttgtaaactatgataaatgaagtggcgaatgctgacaaagcattccaggctcaggatggcacctttcaaaggcaaaagaaggtgaacaatctactaacagcctttgaaacaatagtcaggactttggacttggcccataatgttgtgtttcatattgccctaagaaggttgctctaggaaggaaaatagtttagtggtgatggagagaagggcccctaagggaagaaatttgatgagaaggatgttacaggtgtctaaggaaaaggtaatcagctcctcagacaagatggaatgtgcattgaatttgaaaagatggtcagtgcttcattcatgtggttctcagtagagcatgttgttactcatcctcaggcctcatcatccccagggaaatattctccaaacgctcagactatgttaggtgcctatttttgtactcttactgggttcttgtctccttttgagcagttgtcacaattgcaattacatatttatgtattttattggcctaagggcttcctcccacgttcaatcataggaccatggaaacaaggttgaagcctatgttttaaaccattatgtgtctggtgctttgtctgggtcctggtacataatagatattcaataaattcttgtaaaattcattttttttcaactgagagtacaaaagtaatcagacagtaaatatatgtgtacccttttggagaaacattaaattcattccattagcaggcaatgagttctttatttaaaaaaaagttctttcagcaacttccaaatgtacatctcaagctctgaccactcctcccctttagactcctactaactgcttggaaattatttcagttgttctcatggccaaaattgaactcatcatcttactcttaccatctggtctttttcttctatttctttgttggattgattactacagagttatctaaactagaaacacaggagtcaccttagtcatcttcctttatcttaacactgtctctcatcatcaagtcttcttttacctataatgttcttatatgagtcccttccactctgtctttattaatattgccaactgatgtgaactactgtaagagcctctgaagtgatctccacattgctggttttcatataatccaccccaaaggtctttgtgtttgttggttggttttcattgctatagcaatattcacatttctgcagtactagtaaattacactaaaacgtactgtgttttataattgacctcgagtataaacatacaaattctactgctctgatgtttctttctaagcaatggttgaatcaaaaaacaatgaatttgcctaattttcatgatgaaaacgttcaaaattctcctaagatttcttgaaatccaagcttgtgattgtatgagaattcacaataaaccagctcacaaaatgtataaacttcagtttgtcatagtctatgaggaattactgaagcatacggcatttactcattgatttttaattcaggcaaaagttagaaatacacaaacacatacgcgtacggaggtctcaaagtcagttgtgcgataataaattatttaactcacccttatgataggtaaacagttttcctaaatcgccctcctgccccctgctaccctgactgaaaatatgtgctctggtttgtgctgttatttttgaacaatgtatgccggtatccgatgtaagatgattcatatgatactggtgttaccatggcaatccatcatgtatatagcaagaacactgtgaataccagcagctctttgttctcttcaagtttccattttcttttcttgtttttttttttttttttcttgtgcagtaatccagtggctatgacatcaagagtaacacaatctaattttctccttctgttgcttgtggtaggattcatactctgctagcaagggagttcttggccattttgatttgcaagagattttgcttctccctgatgtttcatttcgtcagcaaagtcttccctctggggaaaaacccacttgaattctaaggctgatagatgctgggaatcccatatgatgagtcctgtggaagcaggacattccagccctggggttgctgttgtctctgacttcagtatatgttcaaagtcatctcaaaataaagtaggaagatgagtgttaacctgcacatcactggcagtttttaaaggtaaattgccatttttacttaccacactggattctccaagtcagactaggatttgggttacaatggggatcattggggttaaattacttaagggataatgagatttacacagacccattaatctttctaagctattgagaaattttacacgtactgtgactgaggagaacctgatactgtaaaagagcaattcagtacagtttcaccatccaaggacttaccgatgcaaattcaaatacacgtgctaagtaaaatgggagagatagagcaagggagatataaaaattccaayagagcaattccagatgccccatctgccaccacgtgcaatggatctatgttcactagtaagtgtgattgaggtaggagatgtggatctaccactcttcccatctcagttcctttggtgaactgttgagtgtgaacattttgccttacattgggtgattcaaggggttctccacggtaaaagtgactatgtcagattcttgccacataatctaagagatgactccactgaagtttgtgttactctaccatcaaaagatgtatctatgtttacagacattcttttattcaatttgaaaagaaatttcaatgtcaataataaatattagcctcatttgtgaattaaacagatgttaagattgcatgcacgtcagtaaaaaaactgttgtacaggaaactctatgcacaggagcctcctaccatgtcatccagctcagctacctttttctattcagctttctgcaagtatttattttatataatgcacatgtaactataaggatacaaacatggatcatacaaagaacctgccctcatggagcttaaaatctaaagacagatgataagtgctaaacataaataactgtccacaacattaagatatcagtaaattcattcattcatttaattcactcatacattcacttgtgcagcaaacatttactgaataggaactgatttcaaaattttcagctaggaatgcaaaactgagagagaaaaattcttagccttcaaaaaaatcaaagtcgaactgctcagacaaaaattcaaagggaaaaataaattataactacataaggactttaatagtcctctaggagtacattagaccaaacacctaccaccagctgggctattcagggattatcttacaaataaggtcatgaaagaggatgaagtactctcctgaaaggcagtgcctaaaaagagggtggctggcagagaatgaactcacattacatagcactttgcagtttgcaaagtagatagtcatatattgtttcctttgactatcacatcaactgataagaaaactgagacccagcagattcaaaggtcttactgaagaccataaagttagttaaatgtggccaggtgcagtgagtgactcacacccataatcctagcagtctgggaggccaaggtgggcagatcatttgaggccaggagtttgagaccagcctggccaacgtggtaaaacctctactaaaaatccaaaaataaaaattagccaagtgtggtggcatgcacctgtaatcccagctactcttgtgtctgaggcacgagaattggttgaacctgggaggcgaaggctgcagtgagctgagatcgtgccactgcactccaccctgggagacagagtaagactctgtctcaaaaaaacaaaaaaaaaattgttaggtaaatcctggagttgggacccaggcaccagtcatctgttctctaaatattgtcccatgtgttctgttaagtaccatggagaaagcaggagtaaaatattttggcagctctgagaagggagaatttactttcaactgggagtatcagagaatgctttgtagataaaatgacatttggtcttgcagcttgcattcagttatgcagagttgaagatgaagggcatttcaggctgggagaacaatctcacaaaggtgtggatgtaggaaaatacatgaacgtttatagaaaaaaaattgagtgtggtcagaatttattgaacttgagaggcaatcatgtagataggagataaaacaggaaaaggagaatgagactatatttttagggtcatgaaaattaagcaaaggaatattttctaaactaaggtgagctattaaagattttgaagagagggagtcctatgatcatagctttgcttatgaaagaatgaagtggcagcaatgaagacacaccttggaataccagaagactagagtaaggagactaatgaggggacttatagcaatcatttgctttgcaggtaataaggtggtaactaatacaagatgatggattacaatattaaattttgtattcttttaagttctatgtttctgcaatggctaaatgcaaacctatcaggaaaagtaaagcgttttgttgttattgttgttgtttttgcttttcaaaaagtgcaggtaattagggcctaacgtggaatggtccatgctaggaataaagtagatagcggcgaatgtttgctagagacattgtgatggactgatctgccctactattacatcctcagcaataaatatgaatgtttaagtggtacaattgccagaaatcagccaaagtttggcataattgttagagatttgttggctgtggatagaactacataattttggaattgtagaggagaacagagaagaaaccaacaaaaaatagtactagtactctgtcactggaaagaagtatgtttaaggccacacagtgaaagttagccatgagcttgagtgctctatcatttttcattatgttgtttgtttattaaaaaaaaaaaaggtaacagctttttctttttaaccaaacatttcttactggaagttcaataggtgtacagttgttttgtttggctagacatggatatttgtgtgttattccctttcagtagttctgaaaaccattttatctttagatacattattttcccaggagcttgggtattttattgaagctgtttcaaatgcatttaatgtcctttgtaatggatttctttatctcttccccaatgctcttggctggagatgttactttttatttgccttatcggtgtgagcacctcattgctataatcaatagatatagtactttagcattctgtacattttaatatgatatataccaaatataatgtataaatgaaaagttatagataatttttgcttaagttttcttttatagagaattgttaacaaaggatatacagccaatatgttaaaataatacctagaaattaaaaaggagtaaagtagaatagtttatctgttgtactaagacttcatacacaatatttcgaaaagtgggaatatctcttgggtgaaatacttcatatatgtattgtatgtacatacatgcaatatgtacacacagaattatataaaatatatgtatatgtatacatctatatgtacagaacatataattttattagcatttcttgtaatggcattttattataaatccaatgacctcaattattctatgggtaagtgctaagtatgtcaagagagctggcatagaaaatggaaaaagcactacaccccttagcttgcaagtagatgtgaattttctgcctttgactttgttgaatctgtgatgaatcatatgtttactctgattaacataaaacatctggatgatctaactttggggacacattgcttcatatgcactgaatgcctgaaaattggtagaattttagattctttttctttataaatgatactacccgaattcctgcaatacctagagagttacaagtgcttagctctgaccttttattccattcaattgaagttgtccacctttagtttattacacatatgactcttagtagagcaaacatctggattattgtcaacagttctcaaacacaccatttggatttcactatcagactacgaacgaacccccatggaaaaaaattcaggcatacaggctacacccagatcctgaatagcccctggttttctggttactattttctcaggccagatccaagaagtcctctttgggcttgtctctgggattctctgataaaattggctttagattgagactgacgtgaagatagagctggtcattgaaagacagaaacagatgtgaatgaaataattctcctttgagacataaaaaaatgtaagatataccaagaaaggggaatttgagttgttcattttctgacaactgtgaaattgttgacccggacaagagagtagggagattaacaatgtgatcatgttcagggcccactgtgccactgaattaagacaatgttggcattctcctcagtcatcttccgaaaatagagatttagagttaggaaaggaatagcctatcccattaactacgtcactcatctcatgcaggtgacctctcatttatgtatttctcaggatatagaccaacgctggagtatagaaatattatgagacacttcgtaattttaggtcttctggtaccacatttaaaaggtaaaaagaaataggtaaaatttatttcaaggatatattttatttaactcactgtatcagattattttaacttgtaaacaatatatataattattaatgagatatttaacattctttcctcatactttgtctttgaaatcctgtatgtattttttacttacatcacatattaatttggatgcccaattgtcctcaattatactggatctttattggacatttagatctcataagatttacaattagaaatatagattcacttcccaagttgttccaaatatagtattattaaatcaactatcagtcttttaattcataaatattaagtaagactaaaaatttagtcctttagtcatactaaccccctttcaagtgcccaacagcctcttgtggccattggctgccgtattagacagttcatatttagattatctgggtttgaactcagagtctgccactcactgactgtattggcaagttgttgccaacctgggcaagttttttctctttttatgcttcagtttcctcacctgagcacacctttttccttgaagaagctctcctgaagaaaatcccgtatttttcttcaggacattgctatttttccacttaaactcagaaccttagagtgatcactgaatcctcctctccctcatcagctttatctgccagaaggtcaagtcctctgagatgtacactgtaaaatctcatgctttcctgtgacttcatttccactgccactaccctctccttttgcatggatagctgcaatgatctcctatttaattagcctcagtctccagactctagccatcactccacattatgccctctggatgctgctactgagttcattttctgaaaatggtatctttatcatactctccacagttcaaactatttcttcactgcccgtcacttccagcataaatccatgtcctctgtgaaaccttttttgacaacttccatgccagatccaaatgacaactcccttccttgtgctgtcatggccctccacacagacttctgccatagccccagagtcctagtccacatataggagtacatgggctctaagccctacacagactattttgttgttgttatttttgttttgttttgttgtttgttcgatatcttgatatctctgtaacagagcacagtggtttcttgacagtttctcattttctgtatgagctagtgaatgacattcctttgtctggcattccaggccttcagaattagctccacttgactcttctggctccttctcttgcttttcatccacacagatcctctggtatagacaaactggtgtattactgtctcacaaatatgtccccaatgtttgtgtctccatgccttggctcgcatcctctcctcttctgaagtgtccctgcattcttcttgatctgcccaaattctaccctttcttcaaggtccagtccctccctcttccatgatgaagactgcggagcatgatgcaattcactgtgtttcaaattcaggattgggtggcctgatggaaggaggccaggcttggggtccaagtggatctgtttcttctgttttccgccaagttgcctaccctctctgaggttcacattccatatctttgaaatcacagtaacaaaacataaggtgcagaactatcttgagtattaagaataacgtgtgcactggcattcagtgagggttcagatggagcacgtgaactctgttactttcagtacagtcataggatatgtaatcatgtagcttctaaaatgtctttcattgtaagattttgttgtcatttggattgctatacaattcatgcttgatttctaaactagactgcaagtgtctggactgaaacaaatgcataatagaattctgagcagatatgcacagatatatatatgtgtgtgtgtatgtgtatatttgtgtgtgtgcacatgtatttgtagatatcaagggagagaggcactttcatgtgtattgattcattcagtccccacaagaaagcatcattctaggaggaagttgaaaatgtccctattttatctatgaagactctagacttgaagagtttgagtccttcccaaatcagtccaactcttaaagtgatagaagcaaaaaattcacagtgtttacacatcttttccaaagctgtttgatgttattatttcccgcatatcacatctgtgagattatctgcctagatcaatatatgtgctaaccatctgtcaatctttatctacatgcaattgtacccaggttcagggattgtgggagggagaaaggttaggtggttgtaagaaggacactgcatagtatggtaggcaaatacagaatacctgcaacaagacaaccatggcatttcttttttttttttttttttttttttgagatggagtctcactcagtcacccaggctggagtgtagtggcgcgatctcggctcactgcaagctctgcctcccgggttcacgccattctcctgcctcagcttcctgagtagctgggactacaggcccccaccactacgcccggctaatttttttgtatttttagtagagacggggtttcaccgtgttagccaggatggtctcgatctcctgacctcgtgatccgcccaccttggcctcccaaagtgctgggattacaggcgtgagccaccgcgcccagccaaccatggcattttttgttaggtcactcagcattggtatcaagaataacaaatgacacttgagtttctttttcctgaaaaagggcaggaagagtctaatagcaagtgcaattgccacaggcaacagtgttataactggaaaatcctaaaatgtagataattttcctccaaatgctttctaacaaaagatagacaagtttaaatttggctgatttcatatctaccataatatagtaccagcaatgccaagatacagaaaactgcctaagaaaaacagagttcagaagacttcggataaattatcatcttaagcttaaccttatacctataaaaaattcagggatatcagttatgacttctcattgagtagtctcatgttagaccaaaatagtttcccatattttggtgaaggaccagaataacttaccagtaaatgaaacaatcattttctttttgctttatactcattctgcatgtgatttgtataggggatcaagtcaaagattgccagtacaaagtaacaacctctcattgtattgcttaagttaatcattaatattttccatggatcaataccctgtagaagcatgagatgcagcagtgatcttcaatttcatgtgcttgccaagtaagaacagccatgggccagattgttgggagccgtgccatgagctacagaccctcagctcccctctataatcagttcttcccccactccagtgctcccaacttgccctaagcagagcgtaattgtggatgtgtaactaccgcagaggggagtatgctttttatgttgttcaattcttcactttctcttctgcaattgaaagttgagctgttagatttcctgaaatgaaatggtgacaagagaaagtaacagaagtagcctttataagtgcctgacttctgggtaacagaagtgacttaaaaaaaataaaagtacaaaacgttgcatttaatgtaaaagatgactgcattagtacaacccttgaaaacattcaagttcttttcagaataaccaccattaaggagttgacaaatattttatgctttaaagtatcctataaaagttcatcacagaaataaaaagcctcctgttcttatccttctcaacaaagccctcttgtatatagatattgagtctggcttacctctgtatcctgttgtgctgataaaccaagaaccttgcaaaaatagatgcacgataattgatatttaataagtgagcgaatccattaatgaaaagagtgctatttcagagagcagtgttcatttagatagatggtcccagcgtcattaagtaaaaggatagagaatacttgcaatacatttggcgtagtgttaagaattttttaaaatgttttaaatgtgatcttttttatgggctgaattgtgtcctctcaaaatgttgaagtcctaacccctggtacctcagaatgtaaccatggagataaggtctttaaagaggtgattaaattaaaatgaggtctttagagtggcccctaatccaatctgaatgatacctttataaagggagggaatttggactcacaaagagacattagacacatgcacacagagacaaccatgtaaacacatggtaagaaggcagccatctgaaagccaaggagacaggtctcagagaaactaaacctgttgacgcctttgatcttggacttccaaactgtagaacactgacaaaacgtattactgtcgtgtaagccacccaatctgtggtattttgttatggaagccctggaaaattaatacagtcttttttatttgctacctttgaaagccctcttgtcaaatgacggtaaagaatagaagacaataaagtgtcagtaataaagggtgacgagaagaaacaactagagatgtgagaggaccaatttaggaaatggaaaggagaggaaaaaatcaacaaagttgagaatgctaattacaaagtgcccacagaggagggcaaaaccagcaaaccattccctttgtcaaaatcttgaaagatggcaattgaggaaccaagaatcttaaaaaggggggaaggtggatgagaaatctgcatatgaaggggagtcctccataggttctcctctcaccctgctcagctaggagaccagtgccactttatcctcattagaatggaaatttatgctataaaaataaataagagaagtcttaacctggggatactaggcacattggaaggtgagagagtaaatgaaagtctatcaactgaatagtgaagttctgacttctctagtagcacctgggaataagaactctgtcagttagccttataatgccaagagaggagatagaaaaattgtttttctataaaaattgtctaaaaaaatatctgcactcccatgtttattgtagcactattcacaatagctaagatttggaagcaacctaagtgtcccatcgacagacaaatggatgcaaaaaaacatgcagtacctataaacaatggagtactattcagccataaaaaaagaatgagattgtgtaatttgcaacagcatagttggaactggaagacattatgttaaataagccaggtacagaaagataaactgcatatgtcctcactaatttttggtaactaaaataaaaatacttgaacttgccaggttcaggggctcacgcctgcaatcctagcactttgggaggctgaggcaggcagattgcttgaggccaggagttcaagaccagtatggccaacataatgaaaccccatctctactaaaaatataaaaattagccagtcatggtggtgcatgcctgtaatctcagctacatgggaagctgaggcacaagaatcacttgaacctgggaggcagaggttgtgatgagatcgtgccactgcactccagcctgggtgatggagtgagactgtctcaagaaaaaaacaaaacaaacaaacaaacaaaacacttgaactcgtggagatagagagtaggatgccatttatcaaagagtgggaagggtagtggggaggaagaataagatctagtatttgatagcataagagggtgactacagtcaacaataatttattgcatatttaaaagcaactaaaagaatataattggaatgtttgtaacacaaagaaatgataaatgcttgagatgatggctcctccatttatcctgatgtgattattacacactgtatgcctgtattaaaatatttcatgtgacccataaattcatatacttactatgtactcataagaattaaaattaaaaataaaaataaccaagaagaattcttcttcagaaaaatggaattaccacccagagaaaagacctatagtactggcattagatggttgcccaataaagaagccaagggtctttattcctcaattaccccatgtattaggccattattgcgttgctataaagaaatacctgagagactgggtactttataaggaaaacatgtttaattggttcacagttctgcaggatgtacaagcatggtgctggcatctgctcagcttctggggaggcctcagggaacttgtagttgtttcagaagacaaaaggggagtaggtgtctcaaatggtgagagcaggagtaagggggttgtgggagttagcacacacttttaaacaactagatctcagagagctcattcactcactcaccaagccataagggatctgcccacatgacccagacaccacgcaccagggcccatctccaacactggggattacatcccaatatgagatttggaggggacacccaaactgtatcattccgcccttggccccctaaatctcatgtccttcttacatggcaaaatggaatcatctcttctcaacagtctcccagagtcataactcattccagcattaactcaaaagtcccaagtccaaatacaaaatcttgtctggaaatgagttcctcccacttatgagcctgtaaaattaaaacaagttatttacttccaagccaaggtacaatagaggtacaggcattgggtaaacattcccattctttttttttttttttgaaatggagtctcgcttagtcacccaggctggagtgcaatggtgcaatcttggctcactgcaacctctgcctcctgggttcaagcgattctcctgtctcagcctcctgagtagctgggattacaggcacccgctgtcatgcccagctaatttttgtatttttgtagagatggggattttcatcacattggccaggcttgtcttgaactcctgacctcaggtgattcacctgtctcagccgcccaaagtgctgggattacaggcatgagccatcatgcctggccaacatttccattctaaaaggaagaaatcagccaaaagaaatgacttcaggccccacccaagtctgaaacacaacaggacagtcattaaatcttaaagttctaaaataatctcctttgactccatgtcccacatccaggtcacactgatgtaagggtagactccaaggccttgggcagctctgcctctacagcttttgcaaggtgaagcctccatgactgctctcatgggttggagttgagtgcctacggctttcccaggtataggatgcaagctgccagtggatctacattctgggacccacagaacaatggcttccttcccacagttccactaggcaatgccccaggggggattctttgtgggcagggcttcaatcccatattcccttctgcactaccttagtagaggttttctgtgaggactctgtccctgtagcatgcttctgcctggacacccaggctttctgatacatcctctgaaatctaggcagagactaggatcactctttccattctttctatctgaaggcttaataccacaaggaagccacaaaggcttacagcttacatgctccagagtggcaacctgagccatacctgaggctctttgagccacggctggactggatggaccatgatgcaaggagcagcctcctgaggtagacagtgtagtggtgccctgtgcttatcccctaaaccatttagtcctcctgtaccactgggactgtggtgggaggagctgcctagaagatctctgaaatgctgtaaaggcctttttcccattattttggctattagcacttgttctcttttagttatgcaaatttccctagcaaatgattgcttgcagcctgcttgaattcctccccaaaaatggccttttattttctatcacatagctaggttgcaaattttccacacttgtaagctctgcttcccttttaagtaaaaattccaagtttaggttatttctttgcttctgcatctgagcataggttattagaagcagccaggtcacatctcaattgcttcagtgcttagaaatgtcttctgccagataccctaagtcattaactcttaagttcaaactttcacaggtccctgggcatgaatataatgtagccaagttctttgctaaggtataacatgggtgacctttgctccagttctcaataagttcctcacttacacctaatactttgtcagcacggactttactttgcagatcactatcagcattttggtcatgaccatttaatcagtctctaccaagtttcaaacttttcctcatctccctgccttctcctgagccctcccaattcttccaacctctgtctcttacccagttccaatgtcattttgacattttcaggtatctttatagcaatgccccactccttggtaccagtcttctatattaggctgttgtggcattgcaataaagaaatatctgagactgggtaatttatgaagaaatagaaaattaactggcttgcagttctgcaggctgtacaagcataatgccagcatttgctaagcttctggagaggcctcagggagctttcaatcatggtggaagctgaagagagagcagctatctcacgtggcaatagggggagcaagagagagagcgggaaggaaggtgttacacacctttaaacaaagagattttatgagaacttgctcacaaagctataagggaaccactcccatgactcagacacctcccaccaggccccacctccaacactgaggattacatctcaacatgagaattggaggggacattcaaggaacaccaccctataatgaaccccaagactctacaagtccagttaaatcattcaaggctcccagtcagtattttagtgtctccctgttgaatatgaatagatagccaagtctccacaaaactctgaggaaattcttcaacaaaaagcctaatgcaaacaaatgaaaataatgatgatgattaggttgatataaaaagagtttaagaaacaaatagacgtttcagaaaaaataaacttcgtagccctagacagatgacaagttatcacattaatgaaacaaaaggatactatacaaaattatcaagtaagaacaaaagagagttagaatttaaaacaatgaaagaagatgctaataaataaaatcagagatgaaaagggagatgttgctgggcacaatggctcacacctgtaatcccagcactttgggaggccaaggcaggcagatcatgaggtcaggagtttgagaccagcctgaccaatacggtgaaatcccatctctactaaaaatacaagaattagccagcgtggtggcacgtgcctgtaatcccagctactcagaaggctgaggcaggagaattgcttgaacctgggaggcggaggttgcagtgagccaagattgtgccactgcactccagcctggatgacagagcaagactctatggggggggggggggggaaggaaagataaggaaagataagggagacgttacaagcaataccacagaaattcaaaggatcattagatgctactaggagcaactatatgcaaataaattggaaaacctaaaaaaatgataaattcctagacaaatacaacctaccaagatttaaccatgacgaaatccaaaacctgaacagaccaataccatcaagattgaagccataatgaaaagtctcccagtaaagaaaagcccaggatctgatggctttactgcttaattttgccaaacatttaaagaagtaatatcaatcctactcaaactattctgaaaaatagaggaggagggagtacttccacacttattgcacaaggccagtattaccctcataccgaaacagaccaaaggcacattgcaaacagaaaactacaggccaatactcccaatgaacatttatgcagaaatcctcaacaaaatactagcaagccaaattcagcaacacattaaaaagattagtcatcgtgaccaagtgggatttttcccaaggaagcaaggatggttcaacataatgtaaatcagtcagtgtgatacatcatatcaatgaaggacaaaaacatatgatcatttcaatttatgctgggaaagcatttgataaaattcaacatcccttcatgataaaaactcaaaaaactgaggatagaaggaacatacctgaacacaaggaaagccatatatgacagacccacagctagtatcatatcgaatggggaaaaattgaaagtttttcctccaagatctgtaacatgacagggatgtccattaccccttgagcaatcagacaggagaatgaaaggatattcaaattggaaaggaagaagtcaagttattcttgtttgcagatgatattattttatatttggaaaaacctaaagacttcaccaaaacactactagaactggtaaacagattcaataaagttgcaagacacaaattcaacatataaaaatcagtagcatttctatatgccaatggtgaacaatctgaaaaagaaatcaagaatgtaatcccatttataatagctacaaataaaatacctaggaattaacttactgaaagaagtgaaagagttctacaatgaaaactataaaacacggatgaaagaaattaaagagaacacaaaaaatggaaagatatttcatgttcatggattggaagaatcaatattgttaaaatgtacatagtacccaaagcaatcttcagattcaatgcaatctctatcaaaataccaatgacattcttcacagatatagaaaaatatcttaaaattcatgtataaccacaaaagacccagaatactcaaagctatactgagcaaaaagaacaaaactggaggaatcatattacctgacttcaaataacactacagagctatagtaaccaaaacaggatggttctggcatgaaaacccaggaacaaattcatacatgtacagtgaactcatttttgacaaaggtgccaagaacatacattgagaaaggacagtctcttcaataaatggttctgggaaaactggatatctatatgcagaagaatgaaactagacttctatctcttgccgtatacaaaaatcaaatcaaaatggaataaagacttaaatctaagacttcaaactataaaactattgaaagaaaacattggggaaactctccaggacattggcctgagcaaagatttttttttttttttttagacagagtctcactctgttgcccagactggaggctgaagtgcagtggtgtgatctcagctcacagcagcctctgcctcctgggttcaagtgattcttgtgcctcagcctcctgagtagctgggactataggtgcacaccaccatgctgggctaatttttgtatttttagttgagacagggttttgccatgttggccaggttggtctccaactcctgacctcaagtgatatacctgcctaggcctcccaaagtgcatggattgcaggtgtgagccactgcgcctggcctgagcaaagattttttgagtaataccccacaagcacaagcaaccaaagcgaaaatagacaaatgggatcacatcaagttaaaaatacctgcgtagcaaaggaaacagtcaacaaggtgaggagacaacccacagaatgggagaaaatattagcaaactatccatctgacaagggattaatatccagaatatattaggagctcaactccgtaggaaaaaaaatctgataatccaattaaaaatgggcaaaacacctgaatagacatttctgaaaagaagacatacaaatggcaaacagtcatatgaaaaggtgtgcaatgtcattggtcatcagggaaatgcaaatcaaaactgcagttaaatattatctcaccccagttaaaatggcttttatccaaaagacaggcagtaacaaatgctgacaaggatgtagagaaaagagaacactcctacacttttggtgggaatgtaaattagtacaaccactacggagaacaatttggaggttcctcgaaaaagctaaaaatagaactcccatatgatccagcaatcccacttctaggtaggtatacacccaaaagaaaggaaatcaatatatctgcacttccatatttattgtagcactattcacagtagccaagatttggaagcaacctaagtttccctcaatagacgaatgaataaagaaaatgtggtacatatacacaatggagtactgttcggccatagaaagaaatgagatcctgtcatttgcaacaacatggatgtaactggaggatgttatgttaaatgaaattatccaggcacagaaagatcatcttcacgtattctcactatttaagggagctggaaattaaaagaattgagatcctggagatagagattagagtgatggttaccagaggctaggaggtgtagtggatgggaggaagtaagaagtggggatgtttaatgggtacaaaaatataattagatagaacaaataagatctggtatttgatagctcaacagggtgactacagtcaacagtagtttatcatacatctcaaaataactaagagaatataattgaattgtttgtaacttaaagggtaaatgtttgcagtaatagattccctgtttaccctgatattattatgcattgcttgcctgtatgaaaatatctcgtgggccccataaatcaatcaatctatctatctatctgtctgtctgtctgtctgtctgtctgtctgtctacctacctacctattatgtaccaacagaaatttaaaatttaaaaaattatgttttggagacgtctagaaaaattggtgataatgtcacataatcaaataaagaaggtaatatataactccagaaaaaacaaaaagttgttccataaataaaacataattatggcacatcatttggtttatcagtaaacgttactttgcagggatgatacaatagaacactgaatgtttatttagccaataattgttatataactgtaatgggaggatagaaagagggaagtagagaggtgaaatggtgaaagagtgtgaaatcttcatcattcataatagaaagtcagttagaaatatggaatttaaaaaaaaatagtttgagagccttatgaagagggtggcacaaaagactcctgcaacttgttctaagccctgtgcatacaatttggggtgtgtgggttagtttaataattattttgtaaatataaaaggaaccaaagcaaccaaatttctggatataaatgtcctgtgttgattatcatgataataggtagacatcttggattggaattttttaacatttgaatggaataccccatttcccctttaatctttgataggtttaacatggtcactaactgtagagtagggacttgtcgtgctctttattggcagaagtgtgactggctacccctgaccgttcgggagaggagacatgtacacctggccaatcagaccagcagattcactgctggtgatgagtgaagttgcagatgtcagggacagcttgtgctgttcaggttaaattatctcacttcagctctcactctaaagatgatttataactagtattcttcactttcagtcttttcactagcaagcaggatacttatggaaaataattaggatgaaaagaggtcactctatcacaatagtgagtttttgaattcacactttaaacgagatgatcctccttaggaaaagcaaaataaaacgaatttccatgccattgttgattctacttgagttaaatactaacataaaaagttggttttctgtgcatagcctggagaatcttgtctctcagaattatcatgccccaggccattccttgcagattttgaattccctttgtctcaaaaacatccagaaaatctttttgaccttcgggtggttggcagaacatgtgttgtgagggcacctcagtttagaagaaaagccctgaacttagttcaaaagaagggctttccagcatgctattcattcagcttaggactgccaggcttcctgaaagacaggtgtgtcagaaacaaagtaaataaacagaaactcacaatgtccagacctttctctccagagcagcacagttcccttgctgagcggcaacagccaaggctttaagctgttccctctcccttttctgttaattgagaaaaccaattgctgcaagagcaacatcagcagagctaaatgtaaatggagtttaatagaaagagacaaataacccactgagaacccctaacatttcagtgtaataccccagagttccacaccataaacttggtattccagtataaagctcatctctcaattgcacgccaccctcccccatcttattcactctcttgcattattaaaggagtgatctcccccatgggatcaaaatagatagatagatagatagatagatagatagatagatagatagtctctaatatatgtattagaaacagagtctgtgttgcccaggctggagtgcagtggcatgaccataggtcactgtaaccttgaacgtttgggctccagcgatctacaggtgtgcaggtctacaggtgtgcaccaccatgtccagctaatttttaaaatttttgtagagacaggatatctctatgttgcccaggctggtcttgaactcctcttctcaaatgattctcctgccttggccacccaaagggctgagaatacaggtgtgagctaccatgcccagccataaacatgaaatttacttatgttttatgtataccatgtgcacatagcctgaaggtaattttacacaatattttaaataattttgtgcatgaaacaaagtttgtgtacactgaaccatcagcaaaggagtcactatctcatgtcagtgaccaaaaagttttagactttggagcattttggatttcagagcatcttgaattttaggtttttggatggggatgctcaacctgtatatatgcatacatgcatatttatgtaacatacataatggtacctaaaacttagcaaatactcatatgttagctattatttttgttggtattactatgaataataactattagcattttctctcatatctaaaatgcagttggtaaatgctaaactcataggaatgttgtaaagatttatttttttattttttttattattatactttaagttttagggtacatgtgcacattgtgcaggttagttacatacgtatacatgtgccatgctggtgtgctgcacccactaactcgtcatctagcattaagtatatctcccaatgctatccctcccccctccccccaccccacagcagtccccagagtgtgatgttccccttcctgtgtccatgtgatctcattgttcaattcccacctatgagtgagaatatgcggtgtttggttttttgttcttgcaatagtttactgagaatgatgatttccaatttcatccatgtccctacaaaggacatgaactcatcattttttatggccgcatagtattccatggtgcatatgtgccacattttcttaatccagtctatcgttgttggacatttgggttggttccaagtctttgctattgtgaataatgccgcaataaacatacatgtgcatgtgtctttatagcagcatgatttatagtcctttgggtatatacccagtaatgggatggctgggtcaaatggtatttctagttctagatccctgaggaatcgccacactgacttccacaatggttgaactagtttacagtcccaccaacagtgtaaaagtgttcctatttctccacatcctctccagcacctgttgtttcctgacttttgaatgattgccattctacctggtgtgagatggtatctcattgtggttttgatttgcgtttctctgatggccagtgatggtgagcattttttcatgtgttttttggctgcataaatgtcttcttttgagaagtgtctgttcatgtccttcgcccactttttgatggggttatttgtttttttcttgtaaatttgtttgagttcattgtagattctggatattagccatttgtcagatgagtaggttgcgaaaattttctcccattttctaggttgcctgttcactctgatggtagtttcttttgctgtgcagaagctctttagtttaattagatcccatttatcaattttggcttttgttgccattgcttttggtgttttagacgtgaagtccttgcccatgcctgtgtcctgaatggtaatgcctaggttttcttctagggtttttatggttttaggtctaacatgtaagtctttaatccatcttgaattaatttttgtataaggtgtaaggaagggatccagtttcagctttctaaatatggctagccagttttcccagaaccgtttattaaatagggaatcctttccccattgcttgtttttctcaggtttgtcaaagatcagatagttgtagatatgcggcgttatttctgagggctctgttctgttccattgatctatatctctgttttggtaccagtaccatgctgttttggttactgtagccttgtagtatagtttgaagtcaggtagcgtgatgcctccagctttgttcttttggcttaggtttgacttggtgatgcaggctcttttttggttccatatgaactttaaagtagttttttccaattctgtgaagaaagtcatgggtagcttgatggggatggcattgaatctttaaattaccttgggcaatatggccattttcacgatattgattcttcctacccatgagcatggaatgttcttccatttgtttgtatcctcttttatttcattgagcagtggtttgcagttctccttgaagaagtccttcatgtcgcttgtaagttggattcctaggtgttttattctctttgaagcaattgtgaatgggagttcactcatgatttggctctctgtttgtctgttgttggtgtataagaatgcttgtgatttttgtacattgattttgtatcctgagactttgctgaagttgcttatcagcttaaggagattttgggctgagacaatggggttttctagatatacaatcatgtagtctgcaaacagggacaatttgacttcctcttttcctaattgaataccctttatttccttctcctgcctaattgccctggccagaacttccaacactatgttaaataggagtggtgagagagagcatccctgtcttgtgccagttttcaaagggaatgcttccagtttttgcccattcagtatgatattggctgtgggtttgtcatagatagctcttattattttgaaatatgtcccatcaatacctaatttattgagagtttttagcatgtagggttgttgaattttgtcaaaggccttttctgcatctattgagataatcatgtggtttttgtctttggctctgtttatatgctggattacatttactgatttgtgtatattgaaccagccttgcatcccagggatgaagcccacttgatcatggtggataagctttttgatgtgctgctggatttggtttgccagtattttattgaggatttttgcatcaatgttcatcaaggatattggtctaaaattctcttttttggttgtgtctctgcccggctttggtattagaatgatgctggcctcataaaatgagttagggaggattccctctttttctattgattggaatagtttcagaaggaatggtaccagttcctccttgtacctctggtagaatttggctgtgaatccatctggtcctggactctttttgttggtaagctattgattattgccacaatttcagatcctgttattggtctattcagagattcaacttcttcctggtttagtcttgggagggtgtatgtgtcaaggaatttatccatttcttctagattttctagtttatttgcatagaggtgtttgtagtattctctgatggtagtttgtatttctgtgggatcgttggtgatatcccctttatcattttttattgcatctatttgattcttctctctttttttctttattagtcttgctagcggtctatcaattttgttgatcctttcaaaaaaccagctcctggattcattaattttttgaagggttttttgtgtctctatttccttcagttctgctctgattttagttatttcttaccttctgctagcttttgaatgtgtttgctcttgcttttctagttcttttacttgtgatgttagggtgtcaattttggatctttcctgctttctcttgtgggcatttagtgctataaatttccctctacacactgctttgaatgcgtcccagagattctggtatgttgtgtctttgttctcgttggtttcaaagaacatctttatttctgccttcatttcattatgtacccagtagtcattcaggagcaggttgttcggtttccatgtagttgagcggttttgagtgagattcttaatcctgagttctaatttgattgcactgtggtctgagagatagtttgttataatttctgttcttttacatttgctgaggaaagctttacttccaagtaaatggtcaattttggaataggtgtggtgtggtgctgaaaaaaatgtatattctgttgatttggagtggagagttctgtagatgtctattaggtctgcttggtgcagagctgagttcaattcctgggtatccttgttgactttctgtctcgttgatctgtctaatgttgacagtggggtgttaaagtctcccattattaatgtgtggaagtctaagtctctttgtaggtcactcaggacttgctttatgaatctgggtgctcctgcaggtgcatatatatttaggatagttagctcttcttgttgaattgatccctttaccattatgtaatggccttctttgtctcttttgatctttgttggtttaaagtctgttttatcagagaccaggattgcaacccctgcctttttttgttttccatttgcttggtagatcttcctccatccttttattttgagcctatgtgtgtctctgcatgtgagatgggtttcctgaatacagcacactgatgggtgttgactctttatccaatttgccagtctgtgtcttttaattggagcatttagtccatttacatttaaagttaatagtgttatgtgtgaatttgatcctgtcattttgatgttagctggttattttgctcgttagttgatgcagtttcttcctagtctcgatggtctttacattttggcatgattttgcagcggctggtaccggttgttcctttccatgtttagcgcttccttcaggagctcttttagggcaggcctggtggtgacaaaatctctcagcatttgcttgtctgtaaaggattttatttctccttcacttatgaagcttagtttggctggatatgaaattctgggttgagaattcttttctttaagaatgttgaatattggcccccactctcttctggcttgtagggtttctgccgagagatctgctgttagtctgatgggcttccctttgagggtaacccgacctttctctctggctgcccttaacattttttccttcatttcaactttggtgaatctgacaattatgtgtcttggagttgctcttctcgaggagtatctttgtggcgttctgtgtatttcctgaatctgaacgttggcctgccttgctagattggggaaattctcctggataatatcctgcagagtgttttccaacttggttccattctccccatcactttcaggtacaccagtcagacgtagacttggtctattcacatagtcccatatttcttggaggctttgctcgtttctttttattcttttttctctaaactttccttctcacttcatttcattcatttcatcttccattgctgataccctttcttccagttgatcgcatcagctcctgaggcttctgcattcttcaggtagttcttgagccttggttttcagctccatcagctcctttaagcacttctctgtattggttattctagttatacattcttctaaattttttttaaagttttcaacttctttgcctttggtttgaatgtcctcccgtagctcagagtaatttgatcgtctgaagccttcttctctcagctcgtcaaagtcattctccatccagctttgttctgttgctggtgaggagctgcgttcctttagaggaggagaggcgctctgatttttagagtttccagtttttctgttctgttttttccccatctttgtggttttatctacttttggtctttgatgatggtgatgtacagatgggtttttggtgtggatgtcctttctgtttgttagttttccttctaacagacaggaccctcagctgcaggtctgttggagtaccctgcagtgtgaggtgtcagcctgcccctgctggagcctcccagttaggctgctcgggggtcaggggtcagagacccacttgaggaggcagtctgccagttctcagatctccagctgcgtgctgggagaaccactgctctcttgaaagctgtcagacagggacatttaagtctgcagaggttactgctgtctttttgtttgtctgtgccctgccctgcccccagagttggagcctacagaagcacgcaggcctccttgagctgtggtgggctccacccagttggagcttcccggctgctttgtttacctaagcaagcctggacaatggtgggcgcccctcccccagcctcgccgctgccttgcagtttgatctcagactgctgtgctagcaatcagcgagactccgtggggtaggaccctcccagccaggtgcgggatataatctcgtggtgtgctgttttttaagcccgtcggaaaagcgcagtattcgggtgggagtgacccgattctccaggtgccatccgtcacccctttctttgattaggaaagggaactccctgaccccttgcacttcccgagtgaggcaatgcctcgccctgcttcggcttgtgcacggtgcgcgcacccactgacctgcgcctactgtctggcactccctagtgagatgaacccagtacctcagatggaaatgcagaaatcacctgtcttctgcgtcgctcaggctgggagctgtagaccggagctgttcctattcggccatcttggctcctcctgttgtaaagattcataaagttgatagattttaaatccttggaactgtgccttgtatatggtgaagaatagaaaagtgccatctttcattattttcaccaatagtaataaagcacaattgtatagtaaacttgtaatatagtatatgctcaataaattgttaattaacttttgtgttcatttcctagtgcatatatatcactaagggaattgatactaatgtcattgcatgcattaatggtaacattaattatcttcttacacattgggcaaaaaaagaaaataccaggctgtcagaacatcttggcccagaaacctcccttcagcaaaaagacaaaaatgtgagtgaagagaatatgcctttgagaattgagagggttgcattttgcctattatgtatagagatttgccaatttccctttcacaaactatgacagtgacactgattctggatgagcaacctgcataatgcttcaggggcacatctcttcttctaaggctgcaggcttgccgatgagacagaacacagcctcaattccatctgctgtcatttatctgccaatatagatagcagatctctgtgggtcttggactgctcaaacgacacagtatattttagcaactgaaggggaaccacttgagatcactaaaggtggaaaacacctgatgacaccttcaatcgaaagaaatgagtatccaaaatctgaaacattaggccccacagtacaatggctctagtgacagataaaaaatactatttctaacccttatagaatgaacttgttttcaagagctcaaagaaaacttttatcacatttatcttccacttttaattaaaaagattatttctgaaatgctaaaacttttgttttattcatgttttagaggaaaggagaggaagagaaaccacctgttactttcttgatgctgtacctggcacctgcccttgattgaagatgagttttgcatggtgtctgaaccaaaaataacaagtcctttaaaaattattgtcctaaaaaccagcagatcaaactactttcttttttctcagaggattcacaaagtatattgtttggaaaggcaaagtcagtgaagaaaaaagaggaacgtccctaaatattggtgttgtcatttataatgtaagacttcactagaatgagattatctcaggtgtgaatggagaaaggtaggatgcatgcagtgtggaagcagccagattcaacacactaaaatcattaacacatatgtttgtgtagttgtgtgtaattttgagggggagaagaggaattttgcctttaattctcactccaaccacttgaccaataattgggaatcatctcttttatcccctatttttgccccttgttctatatgttatttttttgagatgttctttatcataaagtgcctttacgtaggcagtatataagcagtatgcaaaattgagtccccatctctggcattgatctcaaagtcctttttttgttgtcaaatacctttgaatctgtgtcttcaaactctgcttgggttcactcaaatcagtatatttctttccatatgtaggtcttttgatttttgtcctaggttgactctttcctgagttcccttttacatcagaaattaacattttcctaattatccagtctagaaattttagtcatcattactttttcttttcattcatttttaatatccaatccatcctcaggttcaattaatcctttcttcaaactctacttcccctgtctttcattcttcagctgagttcacatcacataggtcctcatccattcatgccaggacttcgacagcagatactaacaggcatcaacctccagactcgttaaattaatcctacacactatttccaggtgacttactgaaagtcttcatttgatcctgtcactctccctttcaggactcttccagcaggtcacaactcacatatctgcaggagccaggagctattcaaatggagaaggcagggggatcctgggcaaggagggtatagatatatcctcacctgcatgcgcagtgacttctgagctcctcacagttgttatcatgtgaaaatataggccagggttggcaggctttctgatttttcaagagaacacagaaattagacttttaaaaagttgattcaataaatatgacaaggtatattagggttctctggaagaacagaattaatggaatatatatatatatatatatagacacacacacatatatataaagggtagtttattaagtattaactcacgtaatcacaacgttccacaataggccatctgtaggctgagaagcaaggagagccagtccaagttccaaaactgaagaacttggagtccaatatttcagagaaggaagcatccagcatgggagaaagatgtaggctgggaggctaggccagtctttcttttcacatgtttctgcctgcttatattctagcagcgctggcagctaattagattgtgcccacccagattaagagtgggtctgcacactgactcaaatgttaatcttctttggcaacaccctcacagacacacccaggatcaatactttgtatccttccatccactcaagttcacactcaggattatcacagaaggcatactatgttctgagctttcttctctgtactgtaaaaaaaaatacagcagtgaatgaaacagacaaaaattctacccttgtggagtttatattccagctgggagtgaaagatgaaaataatttatatattatatatatatgtaatatatagaaatatatatttatttatatatctatatttaaaaatatgtatggggaagattttgtgataaataccatgaagaaaagtgtattagagaagaggttaacgaatgtgtgtgtggtgggtggtggaattttaagtggtgttaggaaagacctcattcagaaggtagcatgtgagcaaacatgaaggaggtacaaaaagtcctcctgccatcatggagggacagtaagaaggtcctggtggctggagtgaagtagcaaagtggagaataagggaaaaagttggagatgaaacagaaggggactcagagctctattcatcttactagtggctttgccttattaaacaaagacctttaaacagatgttaacaagatccctctgactcctaatttggagatgactttaggggaataagggaagaaagagagatcagtgagaagcagaattctttttttcagggtctttctcattgttgttctcactaccatcatcctttggacagacaggtactctttttaagtcaatttgatctaaatgtgggttttaaaaaaatccttttctttgtttaacagctgagacaaagcaggaattttaaagcaacactttactgacaaactatgtagaatcaaagtaacatgaaactagataatttgttctatcataggagatatcttattcaaatgaagtcccctaggagaaactcttcttctgactccctcttcacactggacagcagaggccatctttaactttcccacaagagagggctccacaagacatagtcattactcaagagattgagaatcaagacagagaagtttagtctcctcctatgcttacttaaggctcacctccttaactctgatttcctctctgggaaatctctattcctctggtgactgtatactgggatttagtacaacatttagggaagtgcaacctactcaaaatatccaaatatagcaccataattctaacactctaataagaggcacatccacgtattttcaagggtggggaaagatcattaaataacagtatgagttatattatgttctcagtaaatattagttaccttttcttcctcttggagtgacttttaccaccctctgtaactcatctagccttatctaatgggaggccattttattttgggatggcatgactacataatttcaagctatttcttatgttatttgccgcctcttaaatatcttccccttacctccttctcatacaaaccttaaagttcttcataagtcacaacaacttataaggtcttttacctaactgaaccgatgtcttctctttgctgtacatttacatgtctataacaatcatttttcatttaaatatgaaactcttggatataaaaatattaacttgaaaaatagtaaccctgatttgctctttatactttaacaccttttgtttctttgtttataaatccactgtgcaaagctgtttatgcagcagaaatttagtaaacattctgtgaatgtctgaaacatccattcatcaatccactcacacaaaaacattaacatatactttgtcatgcattgttagatgttcaagcatgaaaatcaaacagtagtgaagaataatttattgtaaatattatttttcagggaagagaacactttagaaataacttcttgagaaattggtttgggaaaatagtatatccaaaattagagagcgccatcttgtgggcaagtgagtatctcacacaaataataactattataagttgcaaaaatagaatttcttctctttttttcttacaattcaaatctcctttttactgtaaatatttgtattgatgcataataattatacatatttaggaggtacatgtgatattttgattcatgcatacaatgtgtgatgatcaaatcagggtatttaagataaccatcacctcaaacgattattattttttgtgttgggaacacttcagctcttccagatattttgaaatatacaataaattattgttagctatagtcacctttctgtgttatcgaacactagaacttatttcttctatctaactatatgcttgtacccattaactaacctcttttcatcccacctctctcttcccagcctctggtaaccatcattctactctctacctccaagagatccactgttttagctcccacatatgagtgacaacatgccatatctgtctttctgtgcctggctcatttcacttattgtaatgacctccagttccatcaaggacacttaggttgattccatatcttggctattgtgaatagtgctgcaataaacatgggggtgcaggtgtacttttaatatactgatttcctttcctttgaataaattcctagtggtgggattgctggatcatatgatagttttatttttagttttttgagaaacttccatactgttttctattatggctgtactaatatacattcccatcgtcagtgtataggagttctcttttcccagcacccttcccagcatcaaataaaatcttttaaagaggctctgtctgtcctagctgaagaactgaaaatatatattaaaattttatataattaatgatattttaaacaatccttagaaactaattgtaatatttacaatttacttttaaatttcttgaatagctaaaaatgaaggctcagcaaagaaattactaaatatcataaacatgacatacttttcataagaaagcttataaaactgttaatgaaaaaggagacagaattcttagagattatctctttaaggggtctatcactttttgggtatctcagggtgctttgaaaatttgactagatcaaatctctcttgaaaaatgtaaatgtacacacaatttttcatatagtttcaggggcttcaccaactcccctgcggttgactcatgaacccattcatgaacttcatattttaaatacttacattttacataatatacaattaaagtctagaaggtttgggggtaaaagctaaaatttgattccattatctcttcatccccaaaacctcatgctcacacaattttataagattgatatagatagatcaaatcatgatgaaatatatttgctacatcgtttgagttcctaagctaaatcttaaaacttatagtttctaggctattaatgttccttacatcaacaaaaataaatatttaatattaggttcatgtcattcatggtatatctgtcacaaatacccttgatgtccattctatccaaaataaaagatgttattatggatttccttctttttcagggctgggtagaattctagtgtgtgagtgtgtgtgtgtgtgtgtgtgtaccacattttctttatccattcattgttgatgaacacttaggttgattctgtatctttgctattgtaaataatgctataatgaacatgggagtgcaaatatctttttgacacactgatttcacttcctttggatatatacctagtagtgaaactgctggataatatggtagtactatttttagcttttaaagaacctcgatgctgttttccataatggctatgtgaatatacattcccaccaacagtgtaaacatcttcccttttctccacatccttgccatctttcatcttttttgtactaacaggtatgagttgatatctcattgtggttttagtttgcatttccttgattattaagtgatgttgaacatttttttcatatacctgttggccattggtatggcttcttttgagaaacatctgtttagatccttttcttgttttttaatcaagttatttgttttcatactattgacctttttgagttccttatatattttggaaatcctgtcatttgggatcacatggatgaatctggatgacgttatgttaagtgaaataagtcaggcacagaatgacaaccaccacatgatctcatttaaatgtgaaagctaaaaatgtcaaactcatagaaacagaataaaatggttgttaaccagggctgatgggtgggggctgaagactggggcaatgttagtcaaaggacacaaaatttcagttaaacaggaggaataagttccagagatctattgtacctcagggtgactatagttaacaacaatacattgcatacttgaaaatagctaaaagagtagatttttagtgatcttgccacaaaaaaagataagtttgtgaggtaatgtatatattaattagcttgatttagccacttcacaatgtatacatctatgtaaataaaatgttttacatcataaatatatacattcttatttgtcaatttttaaatatatatataccttttagaattacagcttagccttgggttaatgaagtcatgacagtacgaggtttataaaactgaacaaagaatcctaaccatacgccaccctaactatggaaatacaatggaactattagttttctgtttcctctttctttctcattgagaaatcatgtcccttcataaaatccatttctctgtgtcagatcattggagctctttttttctccattattatttataatagttagtcttattcatctcttgctagtatgaaccttagtaacctaggttagtatttcccaaagtaggttttgtggaatgctaatatcaacaggtactacctgcaaaatggttgcatggtcaaataagctgagcttcataaaattaaactgatatattactggaagctaaataaatattgtaaatatccaggaaggagatacataggcaaaatattccaaactttattaaatagttaactttttgtttgcttacagagtaatggggttgggtgctccacagagaacattatggcacatgctgaactagagataaaaaagatagatttaaaaatatatgcagattgcttggacaaatttcagcaggatagtgagaaattgatttctagtgtagaatattctgggaaatgagatttttttacattacgtgatcctaattcaaatattatgattaattttaagtaagcaggcaatttgatgtaatggagaaagcactcacctgaaacagagttaacatgttttattccttggtacagtcatgctggtttttaagtgtttagcaattcattttacctctccagctaaggtaaaggaattcttgtaggagtaatagaagccctgtgattagtataaaacttagattaagatgctttgtgcagcaattcccatggcatatttctttttgtcttttctctttctctttctttccctccctccctccctccctcccttcctcctgcgctgccctgcccttcttttctttttctttctttctttcttgacaaggtcctgctttgtgccccaggctggagtacctgggctcaagctatcctcccacctcagcctcccagaaatcctgggattgcagacatgagccaccatgcccaggcccaagtcatattctaaaacatggcttactctgatattaactgccgtctacaggggaatggtctaattactctgcaaatgctctccaccttctagaatagtcacattccaattagtatatttaaagctcttagaagtcacgtaataaaaagaaatattttctttaagattttgaagccatatttacaaattatttgactctctagtctttttcttgtttttattattcaactggactcttaacatctcaaaaactagtattcaatgtaacagtttggaaaatgttcttataccttttctacttttaatagataaaattgtttttaattcatgccaacagagatgaaccaacaatctaaaagaatggactcctaatcaattgtagtgaatggaccatatgttcatattatctgtaattaaatggaggaatttaaaaggaaaggtgtgagaatggaagagaaggctgcctccccacatcctatccaaggctcctgtttctacccgcacaccctaccacagaaatacccaagatttattttctagagaaatgttctcagaaagggtcaggactctgagagagaagatgtagcaccctgcagggatgaggtgtggggctgaaacaaggaatgaagggaatgtctgtggtgcagatctggttccctgagatactccgagatagatagagattgggatgcagggtgtttgtggggaaatgttctcagtgtgagcaccacaggaagaagagtaggaacagggttaaaggctcaatggaggcctcttctggttcagttggggtttctaaaacttagaggaaggggttaggactctatactatctccttcccgtttatcaaatagccattgtctgcagactgctctgtataaatgggtataatcttgggcaagagcagtataccctctactggagaaacacatgctgaggggattctgggcagtgcatttcaacatccagaagagtcagcatcatgaatgctgaaaccttgcctcctaccccaccctctacctaaaatgaaagtaatcagattaatgataaattacttaaaaaaatagatgctggagtacaatagagtaatggcttcaatattttgaaggaatttacatttcaacatagactcctttagcaagtcaaactatgaactagtgtaaagacagaataaagccatctttagtgatgcaagatccaaaaaatgtaaaatattaatactattcacttcatttgccacttgagcttctataaaatgtgacccacaaaaagcaggaagctatcaaaaaggaaatcatgagatccaataatcaacacgggaaataacagaaagaatgcttaggatgtcagatttctagcgggcctagaaagcaactagctgagaagtacagattgaagcaagagtacaaggtgttgaggaggaggctgaaaagagaaaatgaaattgatagattatccaatttgctagagcatctgagaggggtggcagatatgagtaccatttggaaaagaaccaaagcaattattaactactagcaaaacagaagttgagccgtaaagcaaatatgtatatattacatacatagtaaataagatttatatatagtaaaaatatgtaaacagtgattgttaatttaactaaaaattgtgatgtaactaggtgaaaaaagggaactggagatcagtataagataattaaatgtttattatgataagaaatgaatagataatggctaaaaaaatgaaaatcaagaaaaaaaaacccagtataagcatattacttagaattatagagttaattaccagcagaaacaaaatgacttgagaaagagcattcacaatgaatatatatagtatagttttgcagactgttttttgaataaggttttcagtataattttaaaattatatgtgcataatttctctatttatcctgatgggtgagttaaattgccctgacaacctctaaatcttgtaacaacaaagatgatagtgattgttgtttcccatactacatatcatcgacagggagctctgctgcacagcctcctcactctggtacagaaactgacagagttaccatcatggactttgttgatccttctggcagaaggagaaaggggaagagatggagagtctcacaccagcgaatcaacgcttggctgctgattggccagaattagtcacgtggctccattcaactacaagagggttattaagtgcatctacatgtgtcctgagggtggagagctacaaagagagagccagtatcgctaatggttgcctcaatttctctcataataattgttaagtaaaaataaaatagggcttggcgcagtggctcacgcctataatcctagcactttgggaggcccaggtgggaggattgctcgagtccaggagttcatgaccagcctgggtaacttggcaagacaccgtctcctcaaaaaataaaaaaaactaaaaaaataaaaaaatagccaggtgtggtggcatgggcctgtagtctcagctacttggaaagctgaggcaggaggattgcttgagtccaggaagttgagactgcagtgagccgtgtttgcaccactcgctcttcagtttgggtgacagagggagaccctatctcaaaacaaatacaaaaacaaaaacaaaaatggtttacttctagctaaaaatttaattaaaaattaaaaattcctatggataatcagcatgtaaatatttgtgtgataaatatgtaggtatataagcaaaatatgtatataaacaaatatacatatggattatatatgtataatttatatttttatatttggttttttcatatgtgtattattgagtccttaaacaaatgttttttgaatagcttctatttaccaggcattgttccaggttctgggtattcaatagtgaacaaaacagacacccctatttctgtgtagcttatatggagtggtagggacagagagactcagtaagcatagtaaataaatacattgtgtagcgtcttagaaggctctcagtgctagggaacaaatagtgcaatagcaggggagttcaatacagaggctgagaatatggttagaatttgcaatagggaaatcaggttagaaagggccctttgaggcaaggattgaaggggagtggggatagattcgtgggcaaatgggcagggaatgcaaatatcctgagactggagcaggcttgcgatttttccaggaatggctggaaggctagtgaggctgcagtgaggggacataagtgagatcgtgaatggggacataatagggggcatcatgtgaatatatgggatgtagagaccgtgctaaagactgccatactctcagttaattgattgaactctgagtgaaacacttgaatttacaccgggaaataaattgcccagcatctagaagatgattaatatttcatgtaaaccaacttggtcacactatgaagatggaaatgtaaaacttgttacttttctatccattattaattgcttaaagctcttccatgctttagataccgcactaagcatttatgtttcagcaaagtattggcataaaataaagcttacaggatggtgtgaaggcaatattttttgagtgtctacagcatgccacaaaatgacttcaatgcttagaataattgaattacataaatataatgtccccattttataggcgaaaatactgaggctcaacagacataaaatggcttgagttaccaggctacagtagaactaggatttcagtccaggtcagtctgaccccaaaaccttttcttttttcattgtttggatttagcacccccaaaaatgtcttgtaatgcagatttcctgggtccagggaattgtttaagtttttgttctaaaaactttcttatgaagcagattacatatggaaaatgaccctatggactatgagaattggcctttagagaatgtcactgccagccctgttggtatctataagaaccaataagcattatttacagagagtgatatacacagtgataattaagaaataactatatttatgatgacaattttgccaaatttactagaaaaaaataaaatatcctctgatttgagatttattgttcttttcttttgcaggtaagtttggaaattttttttgcttgtggaatagaggtatggtatcacttttttctgaattttattttaattgcttttaacattgagcacctttcataagtaatatgtttcaccacccattcggttgttgttgttgtatatatttggaaagtaacattgtgggtttgcgttatttgattcagaaattttacatatgtgattccatatggtaaatctatgcagtgtttgtatttgggtttgtgtttaaattatttctgtgtcaagtataaggaagaggattgtagtgcggggtctgtgtcagggaaatgggggactgtaaagaacagaggaaagaatatgcatgtaatgagaggttgaaaggctgagaagggcagctccaggcatgtaatctacaatggccatgaatgcatgtcatgaggaaaagatgccttttcaggaacaaaataatcaactgaaaactgttttcattcacttttctaagcccctagttttttgttttctcctattattgtgcaaaatttctggccagactattgctgacatgtacctttgaataaaaaaaatggctgtaactattctgaaacatgttaagttagaaagcaataaaatagatccacttcctggaaaaaagctcttattaactatatgtcaactatttcagataaggagtaggaagtttcagtaaagcttctagatacacaaaagagaggataaaatattagagggacttagaaagacrtgatatttgcactgaggaaagaaggtagcctgtaagttgaccacataggaccacggctttattattgtgcaccgtgctttcattagtatataaaagaggtgattgtgtgagatttaaatcaagcatgaacttaaactaaattccatattaattataaacggtatgtttactttattcaaaaaaagatatatgtttctcaaaataattgcaaatattattattaattatrtaaaaataaagaggaatgaggatactaatctactcacctaagttctagctaagagatgaggtagcaaaggaggaagaagttcttcagttcctggtcttgatgggtaaagcgatttgatctcattatattctctccaatataatcatattaatatcgaagtcatcagaacggagttgatattatcaagctaagtaaatattagaaaaataaaaattaacaaatggtttcactaaaactgcaaagtttgtacctgraccacaaagctaatggactggcctacaatggtctttgttttaactagtattccgggggttgatggaaagggagtggaattaaagggcattgtaaaatgtcatggcatccaatctaattatcagagctctagctccagggtcagcaaactttttctgtgacaagccagatagtaaatattttagccttttggggccacaagaactctgtagtaactactcaactctgctgttgcagagcaaatgcagttatctgtagacaatctgtaatgaatgagcataatatgttccaataaactttatttacaaaatgaaaaaaagtagtgggcaggatttgctctgtggtagttttccaacccctacctagctccctttgaaataaaaaaaaaaattaagtaaactttagagattttggaacaagatgtatgttggcccccttcagatacagataaacacttggtctaagaatgaaatgttgttcaactggagttcagaaacaagatatgaacttctcaaaagctttgatgaatttaaacactagagggcacaaaaggacatttttaagtcaaggacctcttgtaaacagaacactacaattatgagaaactgcctgaagtagagcgatgtgacctcaatgtgcataatttgtttgaaatgtcagcctgtagctcttgtgacctcactgaccacaaaaacttgaagtggttgaccaccttcatgttgctgtaataatagccacatgtctttcttctttttttcctacttctttctcacttctttctctctctyttttttttttttttttgattgcttttggccctttcataaaatatggccaaaattgaggatttatatgatgggattttttttcatttcctaatagtttttttaattgctttagattctaattttcatgtggtgagtcctatttgtagtaaataagttattttgaattatgttgtgtcaatcttttataaaatcataataaaataatgcatgttatttatgcatatgatttatgcatataataatgtatattgacagatgtcatctgttacattgatttatgaactaatttgaaagttttatttcagaaaaatgcttaaaaatcagcagaagcttgaagcctcaaaattactcctaccctttaacacatggacacaaagatggtaacagtagacactgaggattccaaaagccaggaggggaaaggggaataagggaggaaactctacctactgggtacaatgctcactacctgggtgatgggatcagcactgccccaaacctcagcatcacgcaatatactcatgtaacaaacctgtacatgtagcccctaaatctaaaataaacattgatatttttaaaatcctacctcttaatttagtaattctgcttgtagatatttggattgtggaagtaatttgggatattaaaatatttatattcaaagatattcaccrtaaaaatacctataatattgagaacctaggtatattstatgtatttcacatgaactaatgtttaaataaattttcatattagacccagccaatagaatcttgtcaaccattaaatatattttcaaatgacattaagtgatagagaaaatggcttatagtaaaccatgaatgcaaagcagaatccaaaaattatgtacatcraatctcaattgaatgttaaaattagatgcgtaaatatatgtatatacatataaaaataaagaaaatgagccagatttacaagttgcctctcggtatagatgatttttaaaaaaatttaattttctgaattttccaaatttctatcatgaatattcatcattcatatggtcataaaaaataagtattattcaaacagaaaactatttttgcattctgacagcacttttttaggtgtgattcttagatcagtggtgctaaaagtcagaaggttataaggaaattatttatgtatcaggcaatcaatttaaatgaattattgattgttacgcagacacatcattagagtcacttttttagccctgggatgggatgatttgtctcaggtttgggtgttgtggcttagttgccgtgcactaggcagtgaagaccaggaaggaacaagggcctgctggagaggcctgcagtgctgatattgaacatggacttccctgtaagctccctggactgtggtaaagcaggacacatcacacacacacacacacacacacaaacacacacacgtggacacacacactcatgctcctctatcctttttctcttctaaatctgctttctgcccttgcctttccctrtaaatggatgtgtgtggagaggagctggagagacagcaggggtctgaaggatgctaacttggactttttcctgagcaaagaattccttaagaatgacctggtataaaaattttgaagaaatctcataaataatatgggcaaaaatgtgacagcaatgtggcacaatgcaaaagcttgtcactagtttcagcccagcttttcctcgtgattgttttgagtagcatgaattatcctctaaaatgttggtttttattcctttttcattttgtacaaacatacctaaaagggtgaacatagtataagcaaagacacaacgttggaactataaggaataattttttcttaattcactatgtatttttctaacacttttcttggagcttttaatccttagaacctaggagatggaggactatacactcgggtttacttttctttcattttcttcttctgaattcttttttttaacttttaagttcaggggtacatgtgcaggtttgttatataggtaaacttgggtcacaggggcttcttgtacacattattttgtcacccaagtattaagcctactacctattagttttcctgatcctctccctcctcccaccttctaccctctggtaggccctagtgtgtgttgttcccctctttgtgtccatgtgttcacatcaattagctcccactaataagtgagaacatatggtatttggttttctgttcttgcattagtttgctaaagataatggcctccagctgtatccatgttcctgcaaaggacatgatctcattcttttttatggctgcagagtattccatggtgtgtatgcaccacatttttttttatccagtctatcattgatgggygtttaggttaattctatgtctttgctattgtgaatagtgctgcaatgatcatacacatgcctgtgtcattataatagaataatttctattcctttgggtatacacccagtaatgggattgctgggtcaaatggtatttcttttttaggtctttgaggaattgccacactgtcttctacaattgttgaactaatttacactcccaccaacagtgtataagttgactttttaatactagccattctgactggtgtgagatggtatttcattgtggttttgatttgcatttctctaatgatgagtgatgttgaagactttttcatatgattgttggctgcatgtatgtcttttgaaaagtgcctgttcatgtcctttgcccactttttaatggggttgttttttcttgtaaatttgtttaagttccttatagatgctagatattagacctttgttgaatagtttgcaaaaattttctcccattttataggctcactctgttgacagcttcctttcctgtgcaagagctctttagtttaattagatctcatttgtcaatttttgcctttgttgcaattggttttggtgtctttgtcatgacatattttttttttttttttgagatgggtgtctcactctgtcacccaggctggagtgcagtggcatgatctcagctcactgcaacctcctcctcctgggttcacgccgttctcctacctcagtctcctgagtagctgggactacaggcgcccgccaccacgcccagctgattttttgtatttttagtagagacagggtttcactgtgttagccatgatggtctcgatctcctgacctcgtgatctgcctgcctcagcctcccaaagtgctgggattacaggtgtgagccaccacacctggcctgtcaggacatcttcacctgttcctgtgtccaagatggtattgcctaggttgtcttctgggrtttttatagctttgggttttacatttaactatttaatacatcttgagttaagttttgtatatggtataaagaaggggtccaatcttctgcatatagttagccagctatctcagcatcatttattgaatagggaatcttttctccaatgcttgtttttgttaggtttgtcacagatcagatagttgtaggtatatggtcttattcctaggttctctatcctgttccatttgtctatgtgtctgtttttgtaccagtaccatgccgttttggttactgtggccctgtagtatagtttgaagttgggtggcatgatgcctctagctttgttctttttgctgaggattgccttagctattcgggctcttttttggttccatatgaattttaaaatagttttttctagttctgtgaagaatctcartggtaatttattaaaaatagcactgaatctataaattgcttcaggcagtatggccattttaacaatatggattctttctgtccatgatcatggaatgtttttctatttttttgtgtcgtctctcatttgtttgagcagtgttatgtagttctccttgtagagatttttcacctccctggttatctgtattcctaggtattttattctttttgtggtgattgtgaatgggattgcattcctgatttggctctcagcttgactattgttggtgtgtaggaatgctagttatttttgcacattaatttcatatcctgaaactttgctgaagttgtttatcagtttaagaagcttttgggctgagattatgtggttttctagatataggatcgtgtaatctgcaaactgggatagtttgacttcctctcttcctgtttgaatgtgctttatttctttctcttatctaactgccctagccaggacttccaaaatgttgaataggaaaggcgagagagggcatccttgtcttgtgcccattttcaatggtaatacttccagcttctgcccattcagtatgatgttgactgtgggtatatcattgatggctcttattttttgagggctgttccttcaatacctagtttattgagagtttttaacatgaagcgatcttgaattttatcaaaggcattttccacatcttttgagataatcatgtgttttttgtctttagttctgtttatgtgatgaatcacatttattgatttgcatatgttgaaccaaccttgcatctcaaggatgaagcctacttgattgtggtggataagctttttgatgtgatactggatttggtttgccagtattttatggaggattcttgcatcaatgttcatcaagaatattggtctgagttttaaatttttgtyatatttctaccaggtatttgtctcaggaagatgctggccttgtagaatgagttagggaggagtccatccttctcagttttggggaatagtttcagcaggaatggtaccatcycttctttgtacatctggtagaattcagctgtgaatcagtctggtcctggggtttttttggttggtaggctatttattactgactcaatttcagtgctttttattagtccattcagggattcagcttcttcctgattcagtcttgggagagtatgtatgtccaggaatttatccatttcttctagtttttctagtttatgtgcataaaggtgttcataatactctctgatggttgtttgtatttctgtggggtcagtggtaatatcccccttatcatttctgattgtgtttatttgaatcttctctcttttcttctttattaatctagctggtggtctatgtagtttattaattttttcaaaaaaagaacaactcctggattcactgatcttttgaatggttttctgtgtctcaatattcttcagttcagctctgattttggttatttcttgtcatctgctggctttggaatttatttgctcttggttctctagttcttttagttgtgatgttaggctgttgacttgagatctttctaactttttgatttgggcatttcatgctataaatgtctgtcctaacactgccttagctattttccagaggttctggtatgttgtatctttgttctcatttgtttcaaaaaccttattgatttctgcttttatttcattatttacccaaaaggcattcaggatttcaggagaaaaggcattcaatttccatgtaattgcatggttttgagtgaatttcttagccttagcttctaatttgattgcactctggtctgagagattgttcattattatttcagttcttttgcatttgctgagtagtgttttacttctgattatgtgatcaattttagagtatgtggcatgtggcaatgagaagaatgtatattctgttgttttkgggtggagacttctgtagatatctatcagatccatttgttccagtgctaagttcaagtcctgaatatcttaatttcctgtcttgatgatatatctaatattttcagtgatatgttaaagtctcctgctattattgtgtgggagtctaggtctctttggaggtctctaagaacttgctttatgaatctgagtgtttctctctgttgggtgtgtatatatttaggataattagatcttcttgttgaattgaaccctttaccatgatgtaatgcccttctttgtcttttttatctttgttggtttaaagtcttttttgtcagaaactaggattgcaacccctgcttttttctgtttttcatttgcttggtagattttcctccatccctttattttgagcctatgtgtatcattgcatgtgagatgggtctcttgaagacagcataccagtgagtctcgattctttatccagcttgccactctgtgtcttttaattgaggcatttagtccatttacatttaaggttaatattgttatgtgtgaatttgattctgtcatcatgatgttagctggttattttgcagacttgtttatatggttgttttatagagtcattggtctgtacacttcagtgtgtttttgtagtgtctggtaatggtctttcctttctatatttagtgtttctttcaggagttcttgtaaggcatgtctggtggtaacaaattccctcagtatttgcttgtctgaacaggatattatttccccttcacttatgatgcttagtttggccagatatgaaattgttggttggaatttctttttaagaattgtgaatattggccctcaatcttttctggcttgtagagtttctgctgagaggtccacagttagtctgatgggcttccttttgtaggtgaccttacctttctagctgcctttaacatgttttctttgatttcaaccttggagaatctaatgattgtgtgtcttggggatgaccttcttgtgaagtaccttaccaggagtttctgcatttcctgaatttaaatgttggcctctctaactaggttagggaagttctcatggataacactctgaaatatgttttccaagttggcttcattctcctcatgtatttcagggacaccaatgagtcgtagattcagtctctttacataatctcatatttctcggttttgttcattccttttcattctgttttctctattcttgtctgactgtcttattttagaaagccagttttcaagctctgagatttctgagattttttcctccacttaggctgttctgttattagtacttgtaattacattatgaaattctaataatgttttcagttctatcaggttggtgacattcttgtctatactggctgtttgtctgtcagttcctgcattgttttatcatgatttttagcttccttccrttgggtttcaacatactcctgtacttcaatgatcttcattccaatccatattttgaattctatttctgtcatttcagccatctcagcctggtttagaagcttgctttagaagggacrcggttgtttggaggaaaaaaggcactctggccttttgagttttcagggttcttgtgctgattctttctcatctttgtggacttttctacctttaatgtttgaggttgctgacatttgaatgttttttttttccttttatcctatttgatgaccttgagggtttgattgtggtattaggtggattcagctgattggcttcatttctggaagattttaggggtccaacactcagctcccaacttctggactgtgtgcactaactctgggggacttgtatgaggcccaaactttgtcttctcaytcttcaagttttggaatccactcagctaggggtgctgagatgggacagctgcagtgaagtgctagtgggtgtgggggtgcctgcctccttgcagatgttcaccagagtggcagaggcaatgcagcttacagaggtgggcaggaggcccttgctggagcctgtgtgcacagtcacactggaggtggtgttggctgggggtagggtggtggcaggcacaggtctgaatgccttctctgtgccccacaagcaggagtgatagctcagggtaggggaggattcactgttctctgtacagcccacgtgtttacttttcaaataatttgatgaactgagtgaaaatattgaatttagactagctgatttcattaaactatgcttaaaacttcaatttatacaatttttttcttcattttaaaactttgaaccaaattggcttgtaacataaactaatagattcaattagttatttggaattattttcaaagatgtgtccaacattctagagtttaaagtttatatcctcaaattacaattgcytgtaaagtttactggtttatttcctcaaatgatcattgctggtttatgtatatgaaatattctcaaacatatcaaggtacagataaagctatgagacacgtaagcttcttctgttgtccattgggtaggtagagaaatggatgacttggcttatttaagctaattactaaaggaaatagagaagccttgagtcctttctggaacaaaacagaattaaatattcattacatgagggaaagcataatttagaacaaaataatgaaatttccctggagtctgtcttctaagaggtttgatggattcatttaacatacatttatttcactcctactgtgctgggcagtcccagggttatacagccccaggaggttcagagtccagtagaacatgagcatataccactctttttctttacaatactcctttagagaaaagaagactgcagtttgcattttgccctgggtaagaaacaaattagagatgtaaagaaactttgctaagcactacagatgcctttgacgtgtttattcccgttgactcataactgtgtctcaccagataacctatagtatattcataccsaaacttatctttttctaatactttagttattagtttttaggtaacctgaagaagaatgaatatgagcttttcatatctatagtaggttcacttccaatccagagaaaccatggacagacctttttttcagctaaacaaagtgtggtagtttaacatcgcagtaagatcaaaaaccaccttaactgagtatgaaaaatatttgatgatacagtagtcttcaaactaagtttaaaagatgcaaatagtacatatatgccagtacatatgccagtgtcttgaatactgggaaaaaggaggattcgagtgggggaaagttcacgacattgtctctctgcctctaatctttcctgctcaagtccttgcaagtagaatcaaaatatcaattgttctgaaattaattctgcttttattatttcactcccttgttcagaraaacttggtaagttttcacttctaaatggaacaaaggtcccactcctaacgtatcattcaagttccttcacagtccagtctcaacctttctttcctttcttttcctaactatcattgttcataatacagtaatataccctcccaggagtattcaatcttttggcttccctgggccacattggaagaattgtcttgggccccatataaaatacaccaatatgatagctgatgagcaaaaacaaaacaaaaagtctcatgatgttttaagatagtttatgaatttgtgttgggccacattcaaagccatcctgggccatgtagcccacaagccacgggttggacaagcttacaggtctaaactctgataatttcactacaccttggatattcatacttctggtgagcmgaggctgcttacactttttataggccaatatcaatcataacgtttaagtgtttaataagtatcaatatttatctcatatggctctcagaacagtgaattaattcacttagcaaatatatattgaaccattaccactatctggccctattctagttgttggccaaacagcagtgaatcaacatgtctctcctctgaaagaatttaattttttgtggggaggatagtacaaaatatatgaaatacataaacacattcaaaatgtgtgtcgtgatggttagttctatgaaaaaaattagtgcagagtaaagaaatagtaatacgagtgtgattttagattaaaaagtcagaataggtatccctgtctgttaaactgacatttaaatcttaacaaaatgagtgaattatgcatttttccaaaggaagagtgtttcaagaaaaagaaatagcaagtgcaaagctccttaggaggaggcacattgtgtttaaggaacaggaagaagttgagtattgtgggaactgagtaagcaagaaagagaatagaaaaggaggccataaagagaggagagggcttttgaaaaccatggaaaagagtttggattttatcccaaatggagagggaaactagtaaagggttttgagcagagaaatggcatacattttcaaaggatcactctgggtgctctgtgaagaatagagtaggagcaagagtagaagcagggaaaatggttatgacgccactgcaatagccttggaaggagacagtagtgacttggaccygggtgatggcagtggagatggcgagaagtgatcagattctggcaatgttttgaaaccagagctaattgtgtttgatgacggatttttacatagagtgagagaaaaagagatgagtcaaagataattcaagggtttttggcctgaacaaattggaaatgtgtgtttttatttattgagcttgaggagttcaagggaggagtaggtttagtggtggggtggttctgtttgagcattttgagtttgatagtcctgtttgtggaaaatgcttggagtgctgccccatttccctccacccactatagagttcacctgaggctatggcagactcagtcagtttcccatctcaggcacctgggggctttctgcagtacaaaggagcctgctgagaccgtttacagaattttttaacattcccagtggcaacactccaacattgagggtccagagttggtgctcatataccccaggttccacattctccagtgggacagtcctgaggcatgtgtatatatggtcccacaaaaggtccctggggagattgggccccatctgcccctgcttattaatacacactgtattaacttttcttcctttgctatcccacttctccatcacctaactttgatttcctagaatcgccttcctgcctcttctccaaataaactacgcactccaatattttgcagtctccctggaaggaattaaacctaagactattaaatacccatatgtcaatctccaagaaggagattgatatactattctgaaaaccaggcaaaatgtcagggatggagatacagttgggaggcgttagtctttttcacaagcctattcaaaagcccattgcacaagcactagatatgtgtagattcctacacagacttgttaccgtccttgtctgcctcatgtcatctcttccacatgaatacaatgatactcatcaatgaatgctctgaactttcagcaaaggccacagtagaatttctagatagtagtagattgagaagtgatgacaatttgattggaagctaagggatcttggggacttgtcttgaatttgcatttacatagaaagcacatcgtttttatgtttgayacatatttatttgtggtgggtttggaaaaccttgtagcggttatggaggggcaccccaacccatcctttggtgttgccattgctttttaattatgatttgtgctaagccacacattctcattttacctagctcagggttctaagcatgtttttcatgatggtttggttaggaaagtgagtagcaatgaatgagctcctcaataaatacatagcacagacactgacaggcaaagtgaagtttgtaatcacttcccaatcaattgttcaactgaatgtgagaagaaatcattttctctcctgttttgagtcagaatatcacataaagcacaactcttcctgcatacattgtatcatattccacagtaatttacttttttgcaagaagtatccaaaatttggtttttcctgctgagcagttatccagataattgcaaatcagtggaatcatttacatgaataaagatttttattctaattaacgtgctaaatcaagcacaccaaatgtctctaattcttatattactcaaatggcaatatttttgtcagtgactatcatatgaaatttcaggtgcctaatgcattttcaaatggcactcataagcatactaacgttttataaataaatgtctccatatttttaagatgaatggacaatttttgatttttaatrtagtccccaattttcaatttttcaattttcatttaccgaatggagaaacagcattcatcagagcaaaagagcaagtttcacaagtcatgggaacaaacatagatgctaatttcctattttaggaagttctttttaaagtattatcattaagaagcacaactctgtggaatatttatgtgcacatttaataatagagaattcggatgtcaagtctgtgtgttactcatacccatacatgcatcctcaaaaagccttggaagttaatcctcagctgatgaaagctaagcaattgctctggaaggatacttgaagtttttggctcttggggtgaaggtacagtcacgaaaacctctcttcacaagagggcgctgtgcaaacagctagctcctcgtgaaggaaaattgccttgcagactggcacgaagtggatttctttacatctattaagtgctctgctcttcataaaggaaaatttccttgcaaactggcacgaagtggatttctttacatctactaagagctctgcttctttctctctctcttgctttttccttgccatgcctcttcttaggctctgtaaggcagacttcttgtcttctctagttatgcttctgcaaactgcatcatgctgattctattaatgatttgattttaaataataccatcataggtgttaaatgatgtgtatgcctatctggcttctcaggacttctctctcactactttacatctcaccaatgtgtaaaatatctatgagacatctttaatttaatatgattcaaaagtctttactcttgacctttgtttgaagtctaatcaactaaaaacctaaaattcctggtgggaaaaaaagaaacttgactactctagttttttaataacatgtatttcatttattctgattataaaagtcatctttatttattgtagaaaatataaacattatggaaaataaaatttaaaaacatctatcattctattacccagaaataacttgatcaacattttggtgcatattttaatgaatagatttttaaatgagaaatgcttttcaggagtaattagattctacttagtattgacaattttataatatgcttttaaacaaagtattaacattaacttttttggaaaatgccactttctgctacttatagctgtattggctattttctcagaacttctgctgtaatgagtttatactagagttgcaaatacacgttctttgaatgtacttgaggagtcgatagtctgaatctgagattttccacagctcttggagcacctgagaacacactagcttcttccacgattctgcagtacttgctccttcctgataggatgcctttgtaagcgtacaactccaaacatgggctgagtgttcagtaatcatttgtgttgagttcttcagtttcatggagactaaaattaggttttctctgtcactcttgtaatgtcatctgaccttgacctgcatttcaaattgctgagaagttagcaagctgacttttacactaggcacatcagaaataattgattaaaaatagagttattgaagttgaatttttttcatttatagaaaagtacaatgtcttgttcatgacaaacaaggcctaacatttatataatgttcatttaaaatatatcaaaagaaaacaaaataataaaacccacagaaaacccaaaaacaactcacctattaaaacatctcttgatttataaatattatagtttagtttgtacaatatcagtaactgtggaaagctcccaattatctcattcccaagtgcttgactgactcataacttaccaacaattttcttatttcagagaatcccaaaaacatattacctaggactaacctggaataaaacttcatggttgatagcttttatcaattaaatgggtattgatttkgataactcataatcttgagcatatctttagatttactttttatcctgaatttatttttgttagtaagatttagaaattcagatttattttgtgctttatatgacatagaaaaaaacaaattgtctttcctgtacaaagtccacccttcaaaatagactccagaagaaaacatagagacttataacttaggttaaacataggcacaatcctaaatagtattcagatgagtcttacctgaataattgctcacctaatatgataatcacctgttaagaagcagtttcttaaatgtcactgttggaatctaaacagtagatacacaggtgttcactgtaaacttgtttcaatttttctgtatttttgaaaatgttcataataccatcttggggggaaaaagcctctttttgacatggcaagaaccatattctactgaaacagatcttatatgctctatcaagtttatattttagacatccctaattcagctcattctggactattccaggactgattgccctactaaggcatgcttatttttttctttatgtgtataagaaggattcaaagggaccgtttgtcagttttaatgtgtgagcactactgatatgttttattgagaaaaagcttactgccacagatcacagagatatttttccgaggtaagattcttgctggtttgcaagttttgtaaggaggcaccaggacccatctctgtacccccagccacggagcccttatttagacccacactgggctgaaatagaaacttctgtacaaatgtatctctcctgtgctctttccactttaacagaatagaaagaattgactggttgagcccaaatatttcccccaggccagwgttacaaactggcgtttcaccaaaaataactcatttgatatgtttttaatgttgatgatctgaaaaatcatcttcttgtttttgtttgtttgtttgtttttagagatagggtcttactctgtcagccaggctggagtgctggagttcagtggcacactcacaactcactgcagcctcgattcccaggttcaggtgattctcccacctcggcctcccaagtagctaggaccccaggcatgcaccaccatgcctggctaacttttctcttttttgtagagatgggatctagccatgtttcccaggctggtctccaactcctgggctcaagagatctgtccgccttggcctcccaaagtgctgggattacaggcatgagcttcatacctggctaccttcttcttaattatatacattttttcttaaataagagctcatgttattttttatttctataaatattttatattccttctcttcttattgccctgatactttaaataaacctaagcccagtcaaattttgtattacccttgagtttcagtttttggttcattcagccctaagttctctttgggcatgaattgttttcaccattgactactagcaggcagctggcatagcctgggacatgtgaggtgatgctaaacatgcatttgtgagtagaaggaaggaagaaaggagggaaggaaggaaggaaggtaggtaggaaggaaggaaggaaggtaggtgggtgggcaagagagagggaggaagaaaaaaaggaagggaggctggttggtttgattagctgttgaacaaaattccatatagaaagtagcttactagtctatatcttttagctctgtttatttcaaagctttgtgtgtttttgttagggtcacttatagaatatttagaaaaatacttgctgcctcatgcatttcaccatccagtgcctggtgagacctaaaagcccatagttataattttgtttctttgaccaaagtttgttttattttcaaatataaattcaatcccttaagactcacctatagcatatatatcaaacaaaaacacgtcaaatttaactcagaattttgctggataaatgattttactggatatcatctgaccaatgaaataacaattgtgtgttctcaaatttacttctacatttttaaggtagtaagtttaattaaaaatctctaatataaaaatggcttattctctaaaatttagaggtaagctaaagttttcatcaaggccccattatttagcactttccaaacttgggaaggtcacttaactccactgaaccagtagaaataaaattagtggtaacactgaaagcaaaaaccagaaccagtccaattgtcttattaataatagcctaattgtgtaaatgtctgttataaatttcttagctggttctgagagatagctagtaaatggcaccctaagttttatatattctgttacaaaacaaaaacaaataacaacaataagctgttttcttttgctgttactcaaacatctggatttctattgtagcccctagcacattgttacctttggttggatggactgaaaagtgttgtgatttttctcctatgtagaatattcagagggaaagtgcagggcagtgcacaatgcatacaaacattgacaggatcacttttcctcaagctgaactatactctaggcctcctctctctctagttaccacagttgaacccactcagcccctacttgcagcctcagtcccaccccaggctcacaggccaattttgtcctggaattaggaattgaaagatctcaggtaagccagccacaatggagacaagatttagagataagcaaaactgacttggactcacatgtctgtcatatattacctctgtggtgttagccaagttccttaacctctatgagtctcagatttctcatctataaagtggtgataataatgtctgctcgtgagttggaagattaagtaacatgtagatcttatacctgacaccaattgtttttcctgtgaaagttcaaaacttctcttatgatttaattcttcaaggaaggtgacctgacctttttcattcctgtatttacttatattccaggcatgtattggttaagatatacattttgcaattaagagggacctcaattttaacctcagatctgctactcattggctgtatgatcataggggcaagttacttcaacttcgtaagtcttcgtttcctcagtggtgatacagaataaaaataacacaaagcacacagataaattattatgaggataatatatagtataccctaaaattctgtgcagagtcttcagaacactttcatgttagttaccctattcagtcctctcaaaagctctttgcaatggctctctctcaaatgagaaccaaatggataagacattataactcagcaaggtcaataaacaccacagaataaacaccaaataagtggttgatatcatcatagtaaaatgaggaattagaaaagttaacccgacattatggtgatgtttggttcacaaactcattcagtgcacaggaagtgtccaagtaaggaaggggtctgaggatgacaggtactcaggaatgggaaagtttatgactgttggctccaacaaatggataaccagatttagcaagatattgaacagtcacggaaaaaatccacagcaccaaaatttagcacatgagatttttatttagggattcttggtattgggggtcttttttctttctcccaagggagtgattttgtttctcagcctagcaatttcatcactgcttttgcttatttgtaagcataattctaaaaagttgtaagaagccatttctgtccttatttggtacgtggccaacaataagggtagcatgagttggagtcagtgttgcaactggtttcccaattaaacaacctgtctctaggatcccataagttttcaaaaaataagtagaaacatttctatatttaggagaagcttagggttttgagcaatcgagaaattctatcacctaatttttgtaaaatttcttgccacctaattttttttagatcttgtaaacaaagttcttagagggttttaatgctgcaaataaaacattaacatttcttcatatgattaaccttcaagatataacagctaatattttattcttacacacatgggatataaagatttcaaatagagaaaagtgttatctatcaaaactgaggactgatattctttttgaaactgataaartggtatgcctatttaccatgctcatgaagtaaccaattggcaatttttagaacttaaagatgtttctaacagtataaaaatagttttcctacctctcccaaaagcttacaaacatcagtagtgtgtgcctaaaattttgtccagttttcagaatgtttttatataaattgccttattcagccctctccaaaactctttgcaatggctctcaaatgagaaccaaatgggtaagacactgaaactcagcaaggtcaggcaacaatcttcaaggtcacatggcaagttcatggcataactgtgactctaatctctaatcccctatacagtgctgccctgaaaacttgcccaatggtattttgattaaaaaaattaattaatcaatcaaataggaaaaagaaactaaataagccctacctaaattacctgttctgaaatttctgcccctatttaggcacatataagaatataatgtaaatgctccatcttatttttaagatgccctgaaaatattggtttgtccatttattaaacaaacataattgtggtttttatgtctctagactgtttgctaagcactgagtacccagagggaaagcagatgttatccatgttctcatagtgtttaggtctatcaggggagccagataccaaataagtcattactaatgtgatgacattgacaaagaggaagtacaaagtgcagtggagacctcacctggtatggggaggcagggaagacttccggaggaagtgaatttcaagatgtaatcctatatccaccactccttcactcaccagtcaatagctaagtaggatttttatttaagactgtattcatgagtagaatattaaatagaaagaatttttatgacttttaaaatcttcatatacagagaattgaacaagacaatcagtgacaccagaagacttttacacacttgttagaaaattgtgtcaaattatttatttcaaatgattagtctacattgatttcaagatttttaaagaatttgagtctagaaatattttttgaatagttagaaaaatctcttaggaacttgtcagtcatttagtagatattcaataaacataaaatttattttcttttccttccatttcttcctccatgatttctttccttcaatcccatttatccaagtaggctttatccaacaaagctttagaaggagctttgttagtttagtgaatagaaaagcttgacttagttgttttccaaattgctaaaaaaaatcctaaaattaatgtagatggaaaccttaagtgtctagtaaaacattttgattcacaatcatagtcatattgattttttatcattatatttaagcatgcctcttattgattgttttagtctatatcctgattttagctctttaattacagtttgtgtctgtttgtgtcctgggtcatatatgagtaatggatgcaattgtagaagcttaaaacacagagcatgctttcccagtgttcttaagaccatggggtaccttcaattctgttaatgttttactgttgccaagtcttaaaataattgtctcccatttcagaacatggaataattgacctttcratcaagtagactcatataaggtttagaatgaatatttgaaagcaattcaaagaaaattttggtattattttgcaacacttccattttgagaaataacttatagttgattttgataagtaatgtaataaaaatcattttttacatttacttgtactgaatggatattagttttaaggagtacacaagccccgttatcaaactgccttttgtcacactcttttgcaatgyatcattctgaagatagaattacaacgacaccctcatcagaagtagatggtaaataacagtctgttatttgcttccrcattaacttctgctggctttgagtctgtaaccagagactatttcaaaatacagcactatcctgaaacccactatctgcctgctctggtttcctgaagcaatgtctttcaacctaacgcaaccccactgatgtaactgcttatttctctgaagttcagctcaaccctcgtctcttccgtatgcctgttaactagagacttgatgcgcaagtaattgaatgcctatgtggattacgtttaacttatcccactctcaaatttgggagtttcatttttattcatagtagctatctcctataaaggaaattctgagtttctgtgtcagacaccgaaacccaaatttgccatttgtaacatctggaatcttggaaccaaaatcccagaaatattcaagaggcaaaaamgatgccttatttagagctctgcagaacataagagctaagttattggcaggagacgggcactttgctgatactttagtggggttaggacttacatggataacaattggattggagcaatgtttagatttccgaatctggttttccctaggacatataaaattagtgtgcacaacttgtaaacataataatttgtctcagggatggaacatctctccttgctattgaatcatgcttttactaaaattcatctggaaaaataaacgcttaataaatgacagtaattagaatgttcaaaagatgtcttctttgttcttttatactctttgatacccatgaagtaaaaattataaacagcttgttgtattataaatgctagtaaagattcatcctagaaaatcattttatttaatttcttattttttccaaatgtctaaattctcatgtctgtgaaatattagccagttcttcaaaaacaatattgatatttctatttgaaatcaaggcttaattttgctcatgattaatctcagaaataagtagcttatttctatgaccttactgagacctggtaacctaagaaggattatgtgtaactgtgtggaagaaatgaaaaggaggcggtaagtaattatttaagaaaaaataatattaatattgacagacacttcttgtgtctgtaactgatttcacactaggaaaatgaagcagagtttcaattttcttgttcataatttcacatttacagttccattgttttatcttgcttaactgttctagatgactgcctttacaaagcagggggaaaagaaggaagaaatgtttttgacagtaatgaaaaagacaagattagttctccttccttgcacatttttagaaaaagttggacattccctagcagattcattctagattattcgtatgtccttgtagcttatcaattagatatccattaaatttgaatatccctttaaaaaggtaaatttgtaagcaaaggcagttaattatttgtgaaaatgtatactgctggctttagcctgaatacaaagatagggtttatcttgctatcagtaaaattgggataacaatgaaaatatttttctgcttccaaagtcgtatacataaactgtagcttttattagaaatcagtgatgctgtttcacctacaaaaatttaaacaccactggacaaaatgagagctttgtgttgcctggagggtgaaaaaagtccatctttgccagcaacatcccttctactcttctgcttgtctttgtggcctccctccccctccctttcacaccaagccacctcaccccaccagctgttagggactcctcccctctttacgcagatcaccagttatcttacactgtctggctttagtctcagatgaagacattctaataagcaccaagttgttcagctcagtgctaactctgccaggaatgtgtgcatttcctaagagctgccgaaaatggaaattaaatagtttgaaagaattaaatgataatggtggcatttcatacaccagaagggcagattggcatcagtgtaagcaccttttcagtccttctttgagaacaccaggaaagtggctacctgttttgctcatgcgaaatttggatctctatacaaaagcaaaaagacagtttgtgaagcgttacaatattgcaagttgattcagrgagaatgtgttgtgtttatttttgaactctctgctcctccaaggttgctgctgttcagggcagttctcactcacccactttctttgagctcatgtctgataagaaagaggtgaaactgtaaaaaccttttctattactcgtctccaaagctgatatgaaacctgtagcattcttaagaacccctggtgtcctggatgctgttgtgaaaacaagcataatgtttaatgtcttgagcttttattgaaattatatgaatattcaagactcccttggtgtacaagagacagattgagctttagaggtctcaaaatttgcagatatggtgatgttcactgagctcaactcttggtcaattttgtccagttcagagagggttaaattcactcttgggcacttgaagcctctctaatcttatcctgaagaagtggcgctctcccttggtttacagttgaggtcacccgcggggcagtgtttggatacagactgatgaaattatgctgcattgttaacattgaataccactcagtggtgaggaccgatgacggcactagggtcctttgactccttgggtacaatttcttgaaatagatgctttcccaaaatgtcctggactcataaaatatatgaaggattctatttggctttcatcatttatttaatttgaaagaaagttgttttaacagatttatcagagttaagaaatgtttctagggaatagaaaatggacaagataattgatctttgttgtcagagtcatgcattgtaattcactctctaaggtgacgcagcatctccttgagggcaaagctgccaaaagttctgaaagtgatctgcctgtttttttttctcacactgacttttagagaggcgctggtattttcaagacgagtaaatcctgtttacatcctgtggaaggttggctaagaattatatccatctctttttaagagaagttgaaataaggaaaattatagttggcagttagctgtgtgaaatttagtaatctttgtcagatgasccagtcataggcatgtattttttaaaattttttaacgaagccctgtgggtttacattttttaaagttcacactgatataaaggtttacccacttcaatcacaccttttgttgtgtgtgcatgcgtgtgtgtgtgttgtgcttttcaggagtggcatgtgactatgctgtttaatcagggctatatttaaaaacaaattttcgagggagtgtttctcacgttaattatgagataaggcctgagtgaagcaaactctgtcgcaaaggccaagtgtcatgcagcaggaagtcctggccatcccttccagccctgcctcagccagcctgccatctctctgtcagcgcataccactgcacaaaggaaatgccctcactcagctacaagtgcctcctgctccgtgcggggcctcagggccccagagccccgcaccagctctgacttctcgtggttcctggggatcttggcatcgtccttaaaaatggcttttgtttgggatcctctgggagccacggtgccaggaccatctacaagagccaaatcaagattgcgtttctcaaagtcctacaggtattactcttttccttttgtagctaggaagaattgtttaactgccttaggccccttgcaaataagcctttgccctatgttgaccttctaactcctaatgcttgttaaattgacaatatattaaataagagccaagaagatgatgtaaaccttgaaataggggtatgtaggtacgtgcagaagttgaaggaagttgactaactttaaaagctaattctgagagttaaatggcaaacttaacaaagcattcatattactgccacctgaaaaacagtgtattaacttgtctaatggcttaatacagtcaactctaaatgttagggaagggttcttgtttgaccaacaaaaaaaacactacattattcttcataagtgtttcagggcacatgcacatgaaaaaatggaaactaatgctgtttcaggtagtaattcagtgttcatcttgcccagcmgaattacatgtcatgaattcaaactaaatattttaataatcttttgtttctggaagtcatattaaaaatcttgacctcatgacttcactaaactgtcaatgactgttttacaacaaaatcagcttattttaaccaaataactggaaagaaagaaaacacttaaaaaatattggatttccttcttcatttgagtattctaggtgttaataaagagaagattgattattctttattattgtttagaaagaaaaccttttctgtttttgattgattacaatctatagcactgaaaggtatctatttaatcaatagtaaatagaagtgacattgtttgcaaaattttggatataaggtctttcttatttagaccaaatgcagcacatctggaagctgccaagcctatgtagaaatatatattaacactgaattaaaatgtgttctgatttgcctgcatataaaacattcaaagtttgaattaaaataatttataaggattaattatttgctttagacactaaagaagataatgtccttggaatttttagggaactataaaatcagagaaatcaaatttaaaaattttgtataacaatgcataagcaaactttggcaagaggtaaatataatttgccagctaaaggtataggtattaactccatttatttttatttcaaaataaaataatgatttatttgttatgtttgttacagctataaaatttagttgaaaattttaaattatatgcttcctatgtgctttgcattttgttaaatgtgattctcatgcttattgtatgctaaattgtacatttagaacttaacatcaatgatttgctaacattactgtgcatatttccaacatatggtggcttctaggctctcttcatcactagatctgataacaagctccttaatatcataaatctccagctgctgaataaagtaaaagcaatagcttgattgactaatgaatttgagaaatctcacgaaatgcagagtttaagctcttctgtgtagtttgcaaatatattataaaccttgccttctcaatttggcaaagatatttttattttgaggtgttatggtattgtaacaatttaaagctatatgataaatatattttttcaaggttcctttggtcaagttctgaccctttccaaaatataagcattagcagctaagaatgactttttcatgtayttgaatacctcacatctgtaattttaacaagtttcatttgtaacaagtttaagaggtgagaatgacatctcaaatatccatcatgagtcagtttccttcggaagcttgagaggctcagtccttcctttacttcctcttaatttgaatatacartttcccacagaataattaatttttttatatgtgctgctttcactgtttggaggttctagtttatctttccagttgcactgcaaactctttgaggttagaagtttccttacatacagcaaaaatgccagtaatgcctatttgataaagtattctgttaccctttcttatttggcatcacccgataatgttttattggcatagccaacttgatatgatcatatctatcataagttgaattgagtggaagggttagggaggtaggaaggcagttggccactggctcttgcatttctgcaggtccctcatgtatccaaaggagattacgcattcagccacgacaatgtactgacaataatgaaaaaaggtacatatcatataacttaaaatttttatcataccataatacctcaaatgcaccatgagtcactctatatatatacagacacatatacacaccacacacaggcacatgcacgcacagttaaatgctataattatcttctgaagagcatagttttattgcatagcattcttggaattaaaggtgttaaactatttgatgtaaacatgtaaaatatctcataatgtcacagccttgtttttgcatttcttattttttaaaaaatatacaaaatccttacgcggtgaaagtaacttaagcttatcttgacctttaagaggctttggatctgattccattattgaagcaactgaaagaactggacattggacaacatttcttcattgaatttctcccttataattttttttatgagcaatattttttatcttgtaaaatcttcaaatgtgcctattgtagtgtcatttttctttggctattgaatggataataatgcatgctactgggggtacacttagctttaactggaatatttttccttggcatggcttttgctgcctggtaatattcaggctaaaggaaagccaggtgtacaagatatgaaattcaattagtgtctgatttgttaaagtaatagcaaatcatatacatttaatgagtgttgactcttgagaaatacaatctgaaacagttttacaatgctcaaaatagatgtgaaagtttttcagctgtgacaattttttatcttatgtgggtaaaatacatttttataagaaaagattaatatatagcttattaagtttgattgaggcagaaagaaggattgaaagagaaaagaagagggagagggaaggaaaggcaggggagaggaggggagcagggccgtggaaggaggagtgaggaagagaaaaagagagaaagcagagggttacataataaggaaggtactttttctctgtgagcccagaagagattgccaaccatgttttcagtaatgggatcagtgttagcattagggcaccacttacaaagatgagtactaattttgagggcaaggtgctgatttatctgcctaggttctggcacacatgtttaaagattcacctaattactttagagcaacgcccctcccaagtattatagagaagaaagaggagaatgatgtgctcaagaaaacaatgtggagaagtttatattggttgtttaaacatagtacctaaaaaaaaaaaaatggggaaaaacgatctgggaagtaaagaaagaatcaaggagcaaagatttagcaagcctgtggaccctgacaactccaataagagaacactagggaattttgtgatttaaaatatattattgcttaaaactacagtagtgttcaaggaaactttaaatagaaaattactcttcttgagatgattctgtcttccaaagagaacaaatcacaaggatgttaaaaggaacattttatgtgacaagtttggggtaggtactatgtaaatagaagagaaagtcactcaaggtacatttgaatgtagggcagagattattccatagcattccacaggccagaaacagaaagtgtcttctagttttcttgccctttatagtaataggggtcatgggatagaaattctcagaaaatctccaaatctcatttttgccaattgtttcaacatcttttccttcccagcattttagcagagctgccaaacaggtgattaattaaatacatatgtgcatgcttgtacctcgtgtagaaggtctaatgagtaaatttatttgatatgacatagactgaacagtagaaggaaggattaatgacagtcagatcaacaaacaaaagtacaaatggtatctgggctatgaaaagataaagcaatatttgcccaaacaagaagatctagatatccctaaattacctcctatattattaggaagtaaagaccaaatctacaactttgatctggaaattgtatagtagctgatatgaacagggatcataggagagtgtggtctcatagctactctttgctactaccaaaacctgagtggtagcacatcagtgattgcccaaccaaactgcacaattcccattagaaaaagctgtctcaaacccacatcttagaaaggaagtgaatgccaccagtgaatcaatacactgggatgtaactttctgcataccccaagaatacctcctgttgcatagcactttttagttttcaaagcttttcagatgtaacagatgtgacagctgttgtttttagtgtgccacagctcatctcacttaattctttagggtaagtgaaaaagatgagtgtaattagtatcaaataagagaagaagaattgaaggttcagggactagagaccacacatatatgtggttagaaagtccaaagtaagaacagtagagctagtttgtattggacacttactatgcaccaggaaccattcccaatcccatacatgcattagctcatgcatgtcatcctccaaaacagcctcgggaggtggatctagcattacctttatcttacaaatgaggaaaccaggcagagcaagtttaagaaacctgcacaggtgtgaattctggaagtctgtgttagaaccaggactcctggtccctctcccacctccagcttcctcaccagatcctattatcagcacacaaggaaaaaaattccataatgagaggtattgttctaacagatgtactatcttcctctacttaactctgaatttttctctgaagacagaacaccacgtaatttgttatagaatagggcttagtaatcagttaaaatataaacttgttaaataatatctaaactgtcctctaacctaattgatgttggtttaaagaaatgctaagcaaaagcatcaaaatagaggtatttttatattaaaaagaagaaaaaggaaaatgaatccgttattttatattgtctgcttctgccccctcctggcttttgcttcatgggcttccatctggctcatttcatctggccaaaaacattggtcatgtggttgtattttactgccaaatattactccttggccagctgttcagaggagccagaagattctctgagctmgagaggtcaactccatcctgtgtcatgtctatttattctactggcatagtcttgactattaaactaggtttcttaatgatatttcaaattgtgagtaatgttggctaaattgacaaaaagaaattatagacaacatttatatctaagaataacaatactactaacaaccattgcacattgtaggaagaggtagcatggtataggaggagaactttggctctagagccaaacagacccagcttcagtgccaactctgctgctttcttgattgggcaggtttcctaacctctctgagccatttccatgtacataaatagaaaattaaaatatctacttcataaggtcgttgtgcagattagatgaaagcatgtacgtgaatgcaggactacctgccaactctttcatagcattttccaagtcttcactaacatttcacaaattttgtgaagcttcttttgtgaaatacattttcagataaactatcatcattggtaccactcttggtcacagaatagtacaatagagctggcttataaatggttaccttataagcaacttgcacatacaacccaggctcaccttggaaatgtagtgtgcaggaatgattgacagctggctagctctacagccacactgctgctgaggttcacattttcacattatcacttatagctatgagactttgggcaagttacttcatgtgcctcagtttcctcatttgtaaaatggagtattatgaggattaagtgtgttagccatgtaaagtgcctggcacatagacaacactaaaataaatgtcagctattattaataatagaatgtaagctccacatggcagcaatttttgtccttttttccacctttgtatggccagtgcctggaagagtgtgtggtacatattaggtgcttggcgtttgtgtattgaatgaatgaacctattagcaaatgtgttccgattcatggcaagtgtgaggatactctgcttccttttgccacattcatgggaagagggggttagagctgaaggaacctgatggttcatttgttcaaactcatttgtcttacattgaagagcttgaagaccttgaaaggccccagggtcatgcaacttgatagcggcctggtcagagctagaaccctggctctgtgtgcttctgtgaaaatctttgttccaatgtcccacccctcacttcaatacatatgccatctaattcartgctttcagtaaggcagcaaaatgaatgaatgattcagagcacacttcttgcagacaggagagtgtataagagccataattgggcaatgaccatggaaggacaggtttctgaataagagaaagacttatccaagtaaaattatgttcagacattttacttacaagtctaaaaatcacttgctacaacagctacaatagggtttttgtaaggaagtaccactttgtaaacaacatttttgtagaatgcattatatgcatttttttcaaaattgaaggaaagccccatctcaaacattcaaaagaatcygctcaattatcaatgtagactagaaacagagatagagaggggagatacagtttgagtgttttctgtattatcatgacagcacatggaacaaccacaggcagaaagattacaaactctgcaataaatataaaggtattggttttataaggtggcctgcaggctacggaccagcacagagctctggcaaatgtggaatgccaggagatgtacaaaaaaatcaaggtgacaaaagaagaaaagacactccaaactgccaagggtttataatcatgctgtggatatttctgatcatcagtgtgttaatggttttcactatagttaaaactataccatttttgaatgggtaataggtatgaatatttatgcttaattagtagtttataaaatttatactatttattttcataatgttgattttatgattttcaacgagtgccatttgtccttaagtcatgaagtggatgagcccccatcaagtgattttaagagacagtaccttgactgagcagctggatcaaagcctgtctgatctgggcagagcaaataaggaatacttcttacaaaagaggaagcattcaattctatacactttaccttggtactccttgttctggaggcctcagcttctatcatgttctttgccacagtcatatacccaccttctaccttggctctccctcctcctaacttccattattttttctactttcaaactataattgacaagcctttttaatttcaacaagggtctgaagagaggtgtctgattttccgtaaggctgggttatataagcacacagagttgaatcagagcaaaggaaaaatccattggcaaaggaagaatactatatgctactttaaaacttgtctgaatgtattattttatttacttattttagaggcaggtctcactctgtcatctaggctggagtacagtggcatgatcatcactcattgcagcctcaaactcctaggctcaagggatcctccagccacagcctcctgggtagctaggactacaggtgcaccctaccattcctggcttaaaaaatatatattttagagtctgttttgcccgggtttgtctcaaatacttggcctcaagttatcctcccacctcagcctcctaaagtgctgggattacaggcatgagccatggcacatggctcaaattatataattcattagctggtaatagtgtaaatttggaagagaaaaactaaaatgataaagaggaaagatggattgtgaatagagtaaatatatattactgtaattatgttaagccaatcaaatgcaaaggacagttcaaaggggacaagtatgtaagccacattccaaaaaaaaaaaaaaagctttgaagtgaagctttaaaaagataagctttgtgttgagctaaagaaataaactctataaaaacaaaaccctaaaattgttatgacaatgaattaaacattcaaaaatgaacagaacagaatgtaaaagattattccttcaggtggtaaatgttcacaaccagctctctatgggggaggggaagggcactatttgtagtatttgctgatttctgtgccaaaaaattctctcacctgcccatttcaaacagcagaggtcactaaatgtggagttggcaagagatacatagacatagtactctatacagtgtttctatcatatagatacagtagatataagttgccccaaaaacataataatacaaaatgtagccaaatcattcagaagttatgagttttgaatacttatttccattgtttttaatataatttgtttaattatagttaaaaatttttatgtaatttaatttttaataactgttgggtattaacaactgacttataaatactcctaaaaatgtaacagaatgtagtgagggacaaaatggatgcggtctctgctttcatcaagtttacattctggtagagaaagacagaaaataaacaagttaacaataaataaaataaatagagactgagatgagaggttctgcttggggaagccagggaaacctttacaaagaaattgataatttatttgcatataagttcaagcatatccattccatacatctgtgagtacatttgtagttctaggcctgaaactcagaactgcacaaggtcaatggaaccatataaatattgacctcattactgacttgttttcagtctccagtctcttgagtgaatttacctttgcttctttgttattataaaaatacagtgagggaaagtaaaacaaggaggaagatgaaaagaagatgtagggggaagaggagcagtttacaatatactttctattacattgtttcacactatctcaaaactttttatacgtagaaaatactaaagcaaagaaaaatggaagttaaaaatcggtagcagtagtaatagtcctatagtaggaaccttgttttgtttgaaatatgtgtctgtgtctgcctacaaaacataaacaccttaagctaagaataactgtgagattaattttttattttcaaagaaataatacaaattttaaatcttgcattaaaaggaaagctagctggacgaaacttttctgacacacagattttgagaatagcacccataaatatgcttccaatgcttgtcacttgatccctttttggcaattaacttgcctttaattgatttgtggattacccactggaagttgctatggataaaggaatgtaatggcagagtttgtttatatagggtaacaaaatagactggctgggaggagggatttaactgcaaaatatccttgattttcaggaatttttcttttcacataatggcagtgtttagataaagaatggaaagttaatgaatcagatttgtgttcccatccaaagggaagatttatgtcctgtttaagaatcacattaatttgatgacgttagtacattctctagtgaaagagtggccactttagtggaggaaaaaaacaagcaacaaaactccttctgccatcttcaggttgtacctgacgaaaagcttttatttgtgggttctatgaagtatcactgccctgatctcagatgaactaaaagatgaaaacatttcatcgctcaaataattgtttatctcacatcttactggttctagaaaaggactatatattttccctcctaactttcctcagtttcttggtataaagttcaaaatgctttgagtagagttgttcaggaggtcctcagtggcactgccactcactggttgggacgtttttgttctctgtcctcctgtgtggaagatgacaaggacggctttgtgcaacttctgttgtatgcgctgcttttcaaccccttggatgagatactcatacaaggaacgtcaggtttttttcctaaagcaaatccgtgtaaactgagacaacataaaccttagggagatctgacacaccaaaatgccaagaaagggaaagaagaaattattatcggtgggggaaacaaattatcctgtattttggagtgaatttaaaaggcttattgtttgttttagcactacatgacttaaaaaaaaaagtctcgcagtcttgccttcctcatgttggttaaaatggaaaggattctctttctttgctatttatagataacccttagcactctgcaaggatctatttggtataaaatgatgggtgtgaatgtgccagtaagagagaaaaaaatgcttagccatatttactcatataaccaacatctaggtcaaaatcaaaatattaccagctcccaaggggacccctttattcttctttccagtcactatgcacccgaagataaccactaactgacttccaatagcatagatttgactacttttgaattttatatgaatgaaattatacaatataaactcttattttatttcagtcaatattgtgtttatgggattcattcatagtgttttgtgcattctttattctcattttgttagtattgcaccaaatgaatatgctacaatttacttattctagtgttgatggatagttaagtattccagttttaggccattatgaattagagccattatgaacattattggatatatcacttagtaaacaaatgtacatgtagtgttgcagtgttttgtgcatacacgtaggttgggtatatcccaagaggtaggatttctgggtcataggttatgcctttgtctttagatattgccaaatgtgtttctatactggttgccacatttatgtcgcccccaaagtgatgtttcagttctctgcattcttaccaaagtataggtcatccattttcagtgatggcatcttaaaaaatgtttgcctgtaataacaatgtcatcatgccttttatttatgcagttgagtcttttaatctttaggacctgtttttccaggaatagtgtgggtaacagtgagccattcacactctgtctgtttctcctcatgatgaatactatgtaactgtgaattaagtgactaaaataagaaacgatctgatatgcagaaatagagttttccctgtttgatccatatgcagcttaaatatgtgatgttattctacattttatccagattcatttttcaaaccaatagtaatcattgttagcaaaaaccaataaataatcttttattctgttttaaaatttccatgtcgtactttgagttcttgctatatatcccgtgctcactttaaatcaggttttccttcccgtacattatttcttggaaaatatgttttggacttttcctaaaccaccttaacctgttgaaaaacactagtaaatgcataggcagtgtaagtcacgctaaaataaatgtgtattgctttttcaagattttgtttacccatgcatttaaagaaggtttttttccctttattttctttcttttttgtcattatagtcattatgtctttttaatgttaagattccggtaatatatattcctcatttttatgtcatctccaaagctccccataactgattgatgatatcaatccggcttctggcatataaagtttgttgacctggttcagtttgtaccatgtcaaaatgtgatcattaattattagatgatgtcaggaaaaatttagtatgtgtgataactgtgggtcccatttcttaaagctttcaaaatccaatcttaaggctctctactttgtggcatatgagggaacataagtaaacattagagcaatatcaaacgtattctaagggtttcatgatgtgaaacaatatatcactttattaccagacagatacttcacatcgtgaaatttgaaaaagcatacgaggtggggcacagtggtttaccctataatcctagtgctttgggagggtgaggtgggaggatcgcctgagtccaagagtttgacaccagcctgtgctacagagtgagaccccatttctacaaaaaatttaaaaattagtagggtgtgatggtgcctgcctgtagtctcagctactctgggggctgagggaggattgcttgagcctgggaggtcaaggctgcagtgaatgtgatcacaggagtgtactccagcctgggcaacagagtgagacctcatctctgaaaaaaagaaaaagtatgtaatttttacgtaagagtcactcgattcatatcatgaagcttgtgctaaaaatggaatcattcagtgatcatgggctgcttttcaagcatttttcgctcaccctttaccattatgacagtaaactttggggaaaggggaaggcatgggccaatacatcttttagtatttcttggttatactaagaactactgaggaactgctaaggaacaactacatagataaaaagtatttttattataacccttgtgaaaaacctcttcccccataaaacgtttagtatcttgtatgaaggcataatgtacttttaaatattcaaatccaattccagatttcatttatgtgctatgtactgtgtaatccaccacgcaaaatgtaatttcttgcttttaatataaattttcattattatcataaatgaagtctcagaccacaacattttgttaggttgcattcaaatggtaatcataatatgacctataccagtttttgcatggaagggcagcagccggctgaactagatttccacttttgtcttggctcattaaacaacaatggacaagttaccttaacttcatgggtcctcaaccttctcattcgaaattgagtgtatggactgtatattacaatatccttttaagcttacagaaataacattatggaggtatgagaaaattgtaaatgatccaagatatgtgcctaaatatttcttcatacatcaagcatgcattcatgaaatcaacaccaagcccaggaaatatcaaagaatagctcaatgtccctgtgaacttatatccaattcaataattcatccaacaaatgtatattgagtatataatctgctagacttatgaagccttaaactttatgctgtacattctgatatatgttgttttaaccaggggttggtcagctttcaaaagtgacccttttgctaacattgttcttctggctgaaagctagtaagtataagcaaaaggagagatgtatatgatctcacttctatgtggaatctaaaaaagtcaaactcacagaggcagataatagaagggggttaccagggggtgatgggaacaggagggattggggaaatggtggtcagaggatataaaatttcagttagacaagaggaataagttcaagagatctactgtacaacatggtgactatcattaagaacaatgtattgtaaaccaaatattatatgtggtcacttataagtgtgacctaaataatgagaccacatggatacataggggggaacaacagacacaggagcataccagagaggggagggtgggagaagggagagaatcaggaaaaataactaatggatactaggcttaatacccccatgacacgaatttaccattgtaacaaacctgcacatatatccctgaactttaaataataacaaaaccaaaaaaaaaaaagaaaatttctaagagagtagattttaaatgttctcaccacaaaaaagtatgtgagttaatgcatatgttaattagcttgatttagctcttccgtaatgtgtacgtatttcagaacatcatcttgcgcactataaatgtatgcaatgtttgtcagttaaatatttttaaatgaattttttgaaaagaggaggggtgtgaaaatgaagactacttctgactttatattttatattctggggttacaagaatgagacctccctgatgcctacacacaaatggattaatgtgaaactgaaggtttacttgcccagtttacttgcccatgtttacttgcccagttgattcagctggtttatgtataattgtcaacaatttaaactctgtcccattcctccccaaaatttatgtactttaaaaatagatctcatcatttcaacatttcaatttatatatgagagaaataaaaaggactagtaaaaattatatgaagaagcaactccaaatatggtaatttatggttcaaaggagataggtaattgtcttctctcaagagccactagaccacaaaatatcaacatcaaagatgaatgcaagcgctaggggaaacgatacagatcagaggcaccatgtgttgtgcattctggtatttgtcagagataaggaatgaagctgaattttttcatggatttgtcttgaaggaaaataaaatgagaggttatgctaagtataaaactatctttacaaagttcctttccgttaagaccttcaaagatatgtaaaatcataatttgagaattgcttttaaggacctaattcaggttagctaacaaatcattatctaaaaagagagtgttagaatactatgcatttaaagtgagtagttcacttcatgattgagcagaaattcctgagttcaaatcatggctcttccacttgcagcttrtatgacatttatgaaattccttaagtgtgctctgtttcaggtgcctctgcgcctacatcattagagttattcaagtattaaatgagataatacatatatagccgttaaactagcgcctggcatagagtaaacagtcagctcacatcagctagcgttattcacaagaataggctatacatttctttccatcaaagataagtgcaagtttgaatagaaaaattaatttatgaaacaagactgattttatgcttttctatagtgcccatgattcaaaggaaaagaaggaaataatcaccaaccaagtgaccctgtaaaatagataggagttacgccatgcatacatacatgcatatatatgtattttggatatatatggatatattatgtgtgtgtttgcatacgcattatatatacatacatacctttgccaagaaaattggatgtctcatatctaaaaaactttcagtgttaagaactagccaagtgtcaagtacacaatttgtattcaacatatatttacagaatttaactttgtaaaaatttcaaatcactgttattgcttttcctacttgtaaaacaattacaaaaatcccttggcttttgtggtgtggactattataagggactctgatgcttcatgacagggagtaatttgatccaaagtacaacggagctstcgtgtggatttaagttaccaaactattgaagggacccatgcaccaccaagtattcaaatcacaatataatttcattattctctaccctcccttgcaaatgtaataactctgaactgataaacacattgtacctgtgtagaaaaatgccacccagaaggaagctgactgctaatctaggcctgtgctgtccaacaagagagctagtagccatagagcacttgagctgtggctaatccaaatcagatgtgctggtaatgtaacatgcacaaaggatttcaaataatagtgtgaaaaaaagtaaaaattttctcatttgtaattttcataatgattacatgtttaaatactaatactgtgtatagggttaaataaaacatatttaaattaatttcacctggttgtatctaagtgtccatcagccaattaacggataaagaaaatatggtacatacacacaatggagtactattcagccacaaaaaggaatgagatcctgtcatctgcaacaatatggatggaactggaggtcattatattaagtgaaataagccacacacagaaagacaaactttgtatgttctcatttgtgggaggtaaaaatgaagacaattgawctcatggagatagagtggaaagatggttatcagaacctaggaagggtagtgagtggcaggggtgtgggagtggagatggttaatgggtacaaaaatatatttagatagaatgattaagatctagtatttgatagcacaaaagactgattgcagtcacaataatttattgtacattttttaattaaagagtataattggattgtttgtaacacaaaggataaattattgaggtgatggatacctcatttaccctgatgtgattattaggcattgtatgccttatatcaaaatatctcatgtaccccataaatatacctactatgtacccacaaaagtaaaaagtaaatacattaatttcacctggttgtaaaaataactttttgtaatatggctttttaaaaatttaaaattacatgttgtggccatcattcatggttcacattatrtttctactgaacagcgttgatctagacagtagacactacgcaaaaacagctaagaaaattattaattctttaaaaggataaaatttaaagtgataaatgagatcaaattttatgagcaagtccatcgtagttcactctgtgcttgtttctagggaaaaaaaattggaactttctgtagagtgtgccagtcaatgcaaaagtgctcatcaagagagaattaaaacattagcaaataggggctgttgatgaaaatgagattccagagagggtgagaagactgaacacattcctgtaaagcaacagggattaatgcaccaatgagaattgcttttttttttttaaacaaaacaaaacaaaacaacaaaaaaacccactaaatttttctaggggaaaagtaaatgctagagtgatattagtgaattaggggatttgtgaagatgcatttgaatgtcaagaatataatgtagttttcttagtatttttgaattcagtgaccttttgttaacctcaagagactgaggctaagacaccaacatttaccatgtgcttcaatcattctctcaaggacgcacagctcctctgagctgtaataggaattcaggtctgtgtgactcctgagcccacatgaccgaacgtgtgcccatggaacactggtccctgcaactgctctgcaaataatggttctatacttaaatcattttaagaaatgttgcatgtatcgttaccgtcttaaacatgattcattgatttgcatattaaaggcactgagaattgctaaaaaactgtttaactttttaaaatctttttctcaaacttcttttgccacagaacacctcctcccctgcacatgcatctatatgccatttatcaccagttgcatgctgaaactaaccttagacagaatgctatttggaaatgctgagatgccttaaattgccttctatcatctctcattattagttactaaggaaaatggctttgagaaaatataaaatatttcaggaaaatatgtaatttgatgctcagataactcactttttgctacatcagaaaaagcaaaactagaatttaaaaataaacttggatgcatgtcttggttattcttatattcatagtgtgtgatccaaagggagtcaaagaaatctgtagcgaggctgctcacagtctaggtctctttttgtgtaggacaaaggtagggcttggcttctagttgaagctacagttctgtaggacttgggatttggaaaagtaatgacaagataaataagttatcaccatcagagacctaaatggttgcaaatttggcactggttacataatgaacaaaagtttcataacatatttcataagatattttcataacatatgtcttacaattactttttttattttctgaggttttttctctaaattatgctaaaaatgtcatcgagaagcataaaaacagactttcattaatagttgctatagcagtgggaaatttttgtaggaatttaagtaaaaaagcaagttatttagcagttttgttcaaattagacatttctgccatcagcctgccccctgggaacttggaaagtgcatacttgctcttgagttctgctagtgccctaaccacacgcctttcatgtctaccatacttcgatgatcttggattcaaatatgatcctctgccttcctcacagaaagaaacaatttagggacatggacttaatggtaatgactttcaaaagctaatgacgtgcagtctttcggcactgcctagccgaacactctttagacaacctgctgctttagactggacatgcacatgattcctaagatacactaaacaagaatatgagatgctgagtccattgtttcctgtgcaaaattcagttcaccaagaatactattttcaccaagaaagccatagactgtgtgtaggtaaagaacttttgcgctaatgaaacttgttattggctgggactaggggcctaaatactagtttgagattctgtttctgctgtgccatatagcatgagatmccacttttgcctctataaagcagggctatggttatctttccttattacctcagttgattgttggctgtgagaaccaagtaagatatgcttcatggaataacagaagaatgcaagatattatcacgggaggcaacatttttgggatatcacatattagtggaaacttaaagaatatttgagaggttatctttgacatttacataaaaccatgtatgaaacaagtagttcttgtgtttttttaacctatgaactttttcaagtgttttctccacaacattcctctcttctaccaaagaaaatcagtttacagtcatgtgttttgtaaaagcctaaatgggaatgaaggtggttagtaagagggttcacaagatggagaggctcccatgacatttgtaggtttaatctcgtgccccatgacctcttaaaatgtccccatgcccattcagaataccccaattcacttcaaaggcaaaaacaacgtgacattgtgaaatcataccrgatgttctagtagaactgtgttctggtcctattgagttcacccaggagaggcatcaaactctgcaatcagaacatatcaacacatggcctattagctgattctgccacttggtagctgtatattctctctctgtttagtgtccttatctgtaaattgaaataataataatagctcataaggctttgtggggattaagtgagataatcatgtacagtgcccagcacagtgtctactgcatggtaaatactgcaaaaatgttagctgttgactgctcctatttatgaccttcattattaaaaaggggaacttaggctgacgcaggagaatggcgtgaaccccgggggacggagcctgcagtgagccgagatcacaccactgccctccagcctgggcgacagcgagactccgtgtcaaaaaaaaaaaaaaggtgggggggggggaacttatgaatgcctttcacttataccagcatcattaaaaatttaagttttttaagaaccatgaaaagctaaccattgacaatttaagaagcatgcaagcttggtttacaaaagaactggacaagctcagaatgggctagttcagtggagtgactgctgcaggagctcaggttttgagaccttcctgtcttcttccttcatccttctcctctttttgtgttctctccacacacttttcctcatcaaagccaaaacctttgttcttgctatattctctttttagagcctgctcacagtaaaattttaaaaaaatgaagaagtgctgaaagtgtagataagcaattagacatgagttaatgttttttatttgcaagagcatttgcattctaatatgaactgaacattgagtaaatagattcctgactccctaacagggctatgtcttgtgtcaggaagccagcgcactgggcttcttggtaggcaggagacccaagtcatcatctgctactaaggctgggtcttggaagatggagaaggccgtagaagaaaggaaagccaaaaaaagaaaggaatgagattttgatatattaattagctcatacyataagcctggacttttgctaggcattttccatggtaatttggttatacctcaaaacaattctcaacattattatcactgccaccacttctgttagcagctgtgagaacagaggtcatgtgagtaagcagtttgctaagggttgcatagcttaaaaagtagtcaataagctaaagtttgaaccctgagatgcctggccttcacagctaaacttttattaattacacctgcttctaacaacaacaaccatggctaaagtttcattaacctaccagtttctaacaacattaacaaaaacattttcaaaaatataataatagtcatcaataggaataaagggaaacaatccaaaaatagctctgttgaggttactgatggatggggacaggaaagtacaaaattttttctacgaaagtttccctttgaggatcactttccttggctgtcttgccttgtgaaattataccttccctaatggcttggagctgattgtgcccttctttctgtcaaggacagcttaaacttcatggaatagtttatttgaagcttgtgggtaccaattccaggcagcaagatactactttcagagattcaattaacttccttcagagtcacagcaaaaagcgatagagctaaattgattaccttgaagtgccttaaccgttttgctgctgttgttacttcttgagccaatttattctcccagcaatgtcactgttactgaagttggtctgttctttattctcagtttatgaataggaatcatctgaatatagttatagacctctagtctagatcattttttgcaaaattacaaagatgggaaaatttccaagccatagttattccaaatggctgggagtgccttaggaacttatttctggagtcttttgaactatttatattattgatatgaacaatgcccctgattgttagttagcaatctattcattgatagggacatgaaaggcagtctgctgccatctagctttttagtttctatctttaggaattttccggtcctttcacagaaagacactttttaaaggagcaattcttacttcatccctgagagggagacacttatgaaggtactgcagaatcttaaaaaaaaagtcttcatcattcttttacttctttttgcctttaagttggtcttaaatgggtaaaagtgataaatgtaggttgtgtagttcaaatccattgcagtgactaagcagtgaccacccataggggcaaaaactatgtatttttagaggcaaagattgataaccacagccatgaccctgagcaagactgtgaaatagatgcagttctttgccatcctcccttttcctgagttatgggcactttctgccttcatagctgtttcctctgcaaaatggagattttactgtcagaagtctcctattgctattgcttcttggagttggttcccatgctctgggcacaggaaagcaatctgagatcttcactactagtatttattgagcacctatactatgccaggactggactgtgctctgaggtcacagtggtaaacataccgacatggttcctgctgtcatgagccttccaaaggaatagcgaagaaaaacattaaacatatcagcccatgattaaatgcataattagataaaatgcattgaagaagtaaagatcccaggaaaggagagaaccaattaatatgatggatgggaaatcaaggctgctggaaggaagtagtgtataagctgaaaaatgaggagtgaataggaattagccaagtgaaaagcagaggcaaatgggtttcaggaaaaggaaaaacatatgtaccagtaacatttcaagaagaaatgggaaggattagatgatttctgttattcttattaggttgatctcttccatggaagagacacacagaatgtaattaatttatagaatataaaaatgatttttttttttaggaatggggaggtgaggagaagacccgcttcaagttctgttccaatattaatatggttttgctttctctacaaacctaagtaaaacaatggtggtaccaagggttggttgggaggcactagttttcccagtgtacatactcacaactaacataaaagctaaatacgtataatcaacatgcttacactacaaacacaacttcaaataaaattcactagatcaaccgggcacagtgcctcacacctgtaatcctagcactttgggaggctgaggcgggcagatcacctgaggtcaggagtttgagaccagcctgaccaaggtggtgaaaccccatctctataaaaatacaaaaattagccaggcataatggcaggttcctgtagtcccagctactagggaggctgaggcaggaaaattgcttgaactcaggaggcagaggttgcagtgagccaagatcatgccattgcactccagcctgggtgacagagctaggctccatctccaaaaaaaaaaaaaaaaaaaaaaaaaaaactccactggatcctctcttccaacttttttcccctaatttcttcccttagcactgatattatcaaacaagtggccaatcctataaaggctatcagactccaatttaaaaaaactattaaatttaaaaacactcagagatataatgattgtatgccttttatgaggaaacttagtacctaaaagaaaaccctataacttaacattaagcatatgaaggtagctattattcaaataagtagcagtaaagacttttcagctttggatcctcataaacaagacctgcaggtttaaagatttgcatacatcttttaacaatgcatcatttttattatagtatattatatactattttatatttacttaatgagattactgacctgggtttcaagatatgtatgaaatataattaggatatgaaaattaaagataaattatccccaccagaaataatcttagcaggttatttactaaagaatcttaaatccagcagatcaagaaaaactccccaaggagtctttaattagaactctttaggatggaatcaaaatctctccataaaaaatgaatcttgccttaggctacataaattacaaaatctgaagccctttaagcagcattaaaactgctgattttaattgctctgataatgaactggagagagacacactaagcttcctggatttctgttggaaatgaatgggattcttgccaactatggatcacagttatgaggtattctgcacagggaaaatcaaaagaaagcagatggaccttgacatgctatgccatcctatgccttcttccttcccaagaagcatgttacaataactttaagtgaaggttgtcacaactttaagtgaaaagtctcccctttctgtctaatttttaatgtaacttcccccttctcgatatatccagaaaatagttaataacaatccctgagggaaaagaaaaatgctgcccttcatattaaaaaaaagaagataacagagatccccttagtggtgagtgatttatagtgaaaacagccaactcattctcttttgcctccttttgacctagagaactggattcgcggatttgtaactggattttgattatagagtatgttctatggctacaaaagagttttcctttgaggaaaactcaaactgccaacagatatgcttggtatatcagttttcaatgctttcaattgtaaataacagaaacctggactcacaatagcttgaacaaataggaattacttttaagtaggtggcaccggaggtgtttcagctgttgcatgatgttatcaccatttgcaaagaggcagcatctccacaattttcttggcctgttcctcttgatggcaaatggctactgcacgtccagatgatcatgtctgtgtcacagatagtgagagggaaggaggaaggatgagagaggatggccagctaaagttgtatctaccccacttataagaaacacaaagcccttccccagagcttacagccctttagccagaactatgacacatggtcatcttgagtgcagaaagatggaagttaacatttggttttctggtctttttaataaagatagcaaggatgaagaagtttggaaaagactgtgggctagccaatcaaattgtcgaccacatttggcctgtattaatgtatagtttttaaagcctaatgtcaatttgttaaggtgtcttaaggacaggaaaatggagaagaactaagattttttatatcaaatacagagtaaatcttggaaagggtgaattagagtggaaaataaactagacattatctaagagtgccttgaagccagatcttgcaaaacattaggcaagcatgtcactcataatggaccccagggctttccatctcataatgtggataaaaataacagtgtttctctcagtttttaaaaatgtcaccaaaaattcaataaagtatatacatacatattgtaattgtttaaagtaaaaattttatgctgttttgggaagaaaaataaccaaaaaaaaccatcactgaccattggtcatcaaaatctgatttatgccatgtttacaagataaaaacaagaataaataataattgtttgaaatattttcatcatattgcctctgaaatgattgatgtcatactgcctggatttagtcaactcagtgaatgatttatcagtagccatgctctaaggagctctctattcatagatacttatgatttggtgaactgggaaacccacagagaaaggtaaatgaaataggagagccaggtaaatgggccatggatctaagaaccaggaatcatgattgtttggaagaacatatctcagactgagaaaagctggcgctaaagtaagctagcatttgattagaatgttgaaggataatttcattcttggagacagaaaacctaagtagaagcaaaagaagtaggaaatagaagcctgtgtttgagagattcagagtgactgtgttttattagaattgcaagaaagggaacttgaaaacataaatttaacatggggcaacaggccttggattctgaacagagggactttgtttaaggatggctctgtggctgtggaacagtttttctatagattatcaaaatgattctggaaaagaaatgtcattctggactgagagcacataccatagggaaaacatgaggcttatgggctgaattgtgtcacacccaaagtcatatgctgaagtcctaacctaggacctcagaatgtggctttatttgaagattgagcctgtaaataggtgattttgataaaatgagatcattagggtagacccgaatccaacaaggctggtgtctttataagaaaaggagattaagatgcacgcgcacacgcagagaagactacgtggagatgaggagaagatggccatctacaagccaagaggagaggtctcccgaagaaaccaaccccactgacatcttgacctcagtcctctggcctccggaactgttttaaaacataagtttctattgttaaagccacctaagtctgtggtattttgtaatggcagccctagggaaaaactacaatgagcaagtattatttgtattttaagaaataatattataaactaaattcatggaggggaaaatagaaaaagaggtcatttctgaaaacattgtataggtgtaacatagttgacactatcaactactacaatgggatcaggagacagagggtcagtgataacggagctctcaagactggaaactgggcgatccagaaggacaggcggttgatgaaagaaaatgatgagtgtggttgaggctgcgtttcccttgaggaggtgctggtgctcagggtagaggcatccatcacgatgtcagaaatgtgtgtcagacacgaaggcaggaatgaggctgtcgaggaagccatggcaacataaacagagaagtgccacagcgagacaaccagccaatgagttgtgtagtttcttgtaagtagctgaaacaacataaccaaattgttcaatttagtctacatatgaaatttcaatgtcagagaaaggcctttaatctcaaaacgaaataaactaaaagacattattttcctgacagctaagtcttaaaatttcttttgagaaataaaaaaaatggttttctcttttaacatagaggcaaaccagtaagtcagatacttcaggggaaggtagcttggtgatttgaatgtatgtgagtgtgaatacgtgagattagaatcttacctgagaacaaattttcatgagcatcattggagagtgggagagcatgaagacttttacccttctctctgcaggagagaattgtgcaggaggaggtggggagaatgccaccaagaacaggttgcctggggctagtttagcgatggggtccaaacgatctcactaatgtgaaaggatcatagttaccttaccaagggaaagttggcttcaactatatatttcacttctgtaccaggttttgcttaaatgctactctttggagaatatcaagaaatttagatgagtttaccaaatccaagattgtgttccctgcttttaactcttgttactgaaatagccccctgatccccaagagtaatgcttgactgaggtgtttgcatgaattgtttatatcattcattaattaacgtgatgaacatattaaagataggactcccagttttcatcccaagggcttacatataatagtaacaacctttagaaaagtactgcattgtttatttatagaatggctttgactcacttaataatgctccataattaatttgtaaattactttttgactttgcacaattataatttaatgtcatatatctgcaaaagaaaacacttttatgttgctaatattaatttcccttcataaatttgagactgttttgactatagataaatgtaaaatgtcaatgtggtgagaatgactcagcttctcagatattcatttattctataaatatttttgaatacctactatgtttcaggcactgatctaagtgttgaataagtagacaaggacagcctgccttcaggttttttacattcaaataacacaagatgatgaagaaatttttaaaataatctggttccatttggcagataatatagatatgctcagttttataaattttgatacctaaagtattgtgataatccaaatcatgacctttagacattacactatgcttattgattgaaggttgacatatgtttagcatattctcttataatgtatttaaggacttcagtgagtagacaaaagaagtaaacttgatcagacaacatgatttctgagaacagactcttcctggagcaagcattctggttagattttacagggcttcaataaaaaggtatatgtttatgctttttgctagttgggggtttcctagcaaatgattccatgaaaacatttgcagggaattcccatctgttctatatttccctgatttgggggctctgaatcaataatgctgatgtaacagttggcaaattagataagaacagcccgagacttccttttccattaggtgtagtctcatggaaaatcacccttgaatccatcaatggaatgaagcaactgggtggagcctatgggaaaatcctggaggaagtccccaactagtcagcctcccctctctgccttgcactcttggattccttagcgaaacatccaaaatggccttcttgcaaggaggatgcagtcggtgatccacatactgaccaacagctgtgtgtgaaaggcaccgtgcccaccacaacaaaggggcagtgaggtctgctgagcagatgagtcgcttttctggacccttccaggcttgcagttggctcagatgaaaagctcaggcttatgagctgccagaaagtatttggcaaaaagcccaccttttttctcaagtacacgtattcaattgacttgattcctcagagagatttgtgagggtgaaagcaagttcattgtccacttttaatgaccctcaacttctaatgaggtaatatatgtgaaagtgatttttttaaatgcaatgcaaatacagggtgtttttagtcattatttcagtacctgaggaaaatgtaaaaacacaaagccacacatgtaccaaggcactacatgagtgtacttggtttcaccatctaatttagccctctgaagtgtagagtccatcgaggctattattttgtggattgtgtactgaagttgcttttctttgttctcccaacatacacttgtgacacttccaacctctgatatgtatatgttaaatacaggctgtttttcaaacaagataaatcaaatgctagctaggaagtgtgcctagagtttaaagcattctagaatgtactcccatataacagctatacttatataatacctacattgtgccagtgtttcatatatgtgaagtgctttaatcctcacaacaaacataggagggatgtagtattattaccccctttttacagatgtgaaaactgcagtacacaaggtgaagtgagaggccccaaatcacacagctagtaaatggcagtgtcagacctcaaattccactagtctgtcttcagagtctatataattaaccactgctccctgtgcttttaaaggttagtttaatggatattgtgctatttctaataaaaggatataatttttgttatatatttttcttcttagtcttcacttttggatcttggaccacatgtgctattatcatattttagctcataagagacttctctgataattttgtataaaatacacttatagaacatttgtatcttgtaaatgtaatttttcttaccattatctcatttgatcccccttatccacctctagaatatacagagctttatcctcatttttcagacgaagaaatggaccaaagaagactaaacaatttgttcaactccatatcaccagtttgtagcagttctgtgactagaaaccaaatttcctggctcttagtcctacattctttctagtatttcaaatcatcttttcatttctctcccttatgcttttggaaagaaaattgagaagaacgttaagaaccccagtaaaattggagaggcatttcttgagaaatatttaaaataatttaagaagtcttcacaaaagtagtaggcaaaaatgtgttacattaacaacggatctcattaagtcagtgcatacagctaggttctggtttattaattttcaattttttcatttttgggcctgcctaatctgaacactttgcagtacaattctgagtgctctcatgctttgtgctatcgctttcttaaggtagctcatttgcacttgttcatcatcctgttccttcccccagtctcctgggctctgttgctaattattgacccaggaaagcctcagaaggggccaaggcagctaaaattggagtgctctttacttagacttataatgcattttccatttttcagaaagagtaaagcacttttagctaccagatccagagaccattcagttatatgggcacttgagtttctgctaaagaatcacaactcaatttaattttttttttttttggtatttcattcacagccagtctggagtgtgtgtgtgtgtgtgtgtgtgtgtgtgtgtgtgtgtatttctgtttctgtattaacatatgagacagcagaataataatgtgtccattcattccatagatatttctcaaagagttgccaagaataaagaatagtgctaaaaaaaggtggaagatggttaggtgtaaaattacctcctctcacaggacctggcacatgacaaatgcttcagaaatatttatcaaactgaaatgagctattacatgaattgtattctctggctttggaatctattggggaaatgatgaagtcattaaatatatgcgaattggaaaggaatttaggaatcatcttatgcagcccttttactttaaagatgaagcaatggaaatgcaagaaagttatgtgtcttttccaagcaagatcacacatctatttcgaaataatatgctttttttcattgtaacatgtgttttagagattacacatatgtcaatgtctgtagtgcagggcataatgtgaggagagctgttgaatgctttagaacagtgctacccagtggaaatataatgcacaccccatatacaattttagatttttattaatagccagatttttaaaagtttaaaagtcagtgaaattatttttttcatactaagtcttcaaaatccagagtgtgtattatatttttgacacatctcaatttggactagccatattttaagtatttaatagttatatgtgtcttggggggggctactctatagactatatggctccagaatcacagagagggaaaaataataatgtatttttaaagctgcagtatttttaccatgggttatatttttaagtttgattgtaacacaaaagtacaaaaatgaaacaaactgactcaacacattttttttcttttttttattattatactttaagttttagggtacatgtgcacaacgtgcaggtttgttacatatgtatacatgtgccatattggtgtgctgcacccattaactcgtcatctagcattaggtatatctcctaatgctatcccttccccctcctcccaccccacaacagtccccggtgtgtgatgttccccttcctgtgtccatgtgttctcattgttcaattcccacctatgagtgagaacatgcggtgtttggttttctgtccttgcgatagtttgctgagaatgatagtttccagcttcatccatgtccctacaaaggacatgaactcatcattttttatggctgcatagcattccatggtgtatatgtgccacattttcttaatctagtttatcattgtgactcaacacatttaaaaaaaaaatctagagtagacctatacaatttgacagattgcatcaatagttacaattttagacacccctacccctccacacatagaaattagtgaataagcagactgtcaatagtactggctcaaataattctacatacaagttctaccaaactttcaagggaggggtaacttctaccttatacgaattatctcattttacaagtaactataagtatacaataagttccatttgcagcactataggagcttgaactgtctgccaatttttaaagaatatgctcaagcaataatcttggttatccatattatcttacatttccttatgaatattgagagttctgttattgataaatacaaaggtgtcactgtttaatacactactgtgtaggtccttttgctatgcatttactatttaaagcgtaaaaacgtaggtagcaagaagatttatctttctggctattcttgaaattcctgtttctaacaagatattctgcagaagcaaagatactactgcattgttcaatgtttccacaaaaggttaatataattgtgggttcagctatcaccttgaccttttcttggatctttgatcagagtttaggtaaatatgttgttaggtttcccccttttaagttcctgagcttttgaagtaaaaccagagctgagataggaaagtgaacagcaaggggcagagcacagcagaaactgaattaggtcacttttctagaggcttctgaatttggtacagtaggatttctgtgatcatcttaaacctagcttttcaaaaggctattactgttccattttattctctggcccagaaaataaatcagaagacttctacatccttttcctcaaaagctgattctgattctctatatgatgccacattaataaagttttccctattaattaccatgatgccatgcagccttctaagatgttttctttagttcttagttcctttgcagttccatctccaagcataaattctcattaataatcagtacagtgaggaagatagacatgtgtcagtcagtgagaatgcttgcagctgtaactgccagaaagttgtaacttaactggcttaaaccaaagccatcctgaggtgggaggctccaagtcactcagtgacattatcaaaggcggcctgagtctttttcatctttctcttctgccagcctcaagtgttggtgagttttctggtttgttcctgtaaactcgagatgtctgtcacaggtccacctattacatgcagataactatggccagtcagaaaagaggatcttctttttacgtcttcttttaagaaagaaaaaaaatcatttccagatggtctccccttgtcccacttcccttcaatgtcttattggccaaaatggtttcacatgccgatgtcttaacaaatcactgccttggaaatcgtactttcatgattagctgagacaatcaggtttccctcatggtggctggggctgaggcccacctccctgtaagtatgtggctgcaagggtaggtggatatttgaatttcactgggggcctagtaggaaggaatggctcttgggtaggctacccatagagtcaactacaagtaaatcagaaactatagtatcataagtgctacagggaaacatgtaaatgcaggatgctgtaggaacacgcaagaagggcccctggccatgcttgcttgagcaagagggagagaggaatgccagagtgggcttttaatgaaaatgttatctgatctgagatataaagctcaagaggagatagccaaggaaagggtggtggaaggagagagagggtatcaggtagacacagtatcatgtgcaaatgactgggaataagataaaatgtggtaggtttggggagatgcagaaaaattagttggcctaaggtatagagcataagttggggagtcagtcagaaatagggctatagaggtaaactgtagatcataaaagatctgataagtcacatagaaatttctactttattctgctgcagtggggagccagtgaaatattttaagcagcaaatgacataattaaatatgcacttcaaaaaaaaaatgtctttggctgctgtgggaaattggattgcaaatcttcaagaccaaaagtaggtagaacatgtgagaatcaattacaatattccaggaaagagtggtgaagggctttaagataatgtcagtggggctggagagaggtgaataggtttgattgatgtttaggggttttgactaaacaggacttggttaataggtaagagaaatagggattaataatcactcacatttctggcttggacaactaggaggatgggaatgacatttactgagttaggatatccaaagaagaagcagactgggggcaaggggagtgaattaatttaaattgtaactaatgaagggcttattctgtatgaaattcaagagaagtattccagtccttaaagcattttcaaatgccaagggatatattaaccaataagtggtatagaacaatactaggggtactataatttatcacagatggtcatcaataaagcaagagagagagataaaagagcttaaagaagaaattgcctctctctcagaaagaattagtgggagaatctgatgttcttcatgaaagaaaaaaattttagttgaatcttgcataaaaagattagacagatgggaattgtcgagggtggaggcactgtacactacatgaagcatatttaaggaatgataacagtctagattgctagcaagcttgaataggcaaaataaaatagaaaggttagggaytagttgaattagtcagaactgttgagattccaagagaaaaacaaaattcacattttctgtgttgatctattattgcaaggtgcattagtcagctattgctacagtaatgctaccgaacaatcaactacaaaataccaatgacatttgcttcttgctcatagtcctactaatgggtcagaatagtgctgcttcaggctgcaggttgccttcatgcttgttcttcatgtttctccttcttggaccagtgatctcccagggcgtgtccttgtggcacagtttacaactcccaatgtggcaagtagaaatgttcaatactttgtaaggcctcagtttataaagcagtatcatttgtgcccacattctgttagccacagcacataatrtgactaaacccaatatcactgagggaggagagcatgaggaagaaaaggatggtgaatatatgctgcaatgcctaaaacataatgtaaatatagatagcattggatttgacccataagccataaagattctagaataccagtgttcccaactatggagtgcccaatgagcttcttgacaaactcaggagagtaacctccatttgtgtgacctcctttctttgctctttatttgtgcttttcaaagggatgacatgagcccataaactactcattgggttgcttggtcagaatcagaaccagttacttcaggactgtctcatttcatgattagttgcctttggtctcatgcagtggtatcagttcattcctctagaggtttatgttccctcaatcaccagcaatactgagtgaatgataagaactaaagcaataaaaaatgattgaactattttccttagtatgtagttattggacttcttccaaaaatccagcacacttataaaaaccaaactaaggcattttgctggttattgtgccaatagtgtgtcttaattagtcctgagaatttatgtggcccatgaaagaggcataattttcctaagattgcacagctaagttacatatctgagacttgaagacatcctcagattatgttatccctaaatctctaattgctwtgtagcaaaagattttagccatttttttattcctgaatcaaggatacataaataaagttgtattcaatcaatccaaaaatcctcaagcccaaataatcctagtacttgagcagaccttatagtgtgtgtgcacaagtgcgcatgcgtgtactctatttttagattatcttttaagagggaccggtgacatggtcatacagtacaacagaagaactcactccctgtttctctataattcccatattacactcagcacttgctctcctttcattctgtggcttctgtgctgctagcagtgaccagtgactcaggaaggctgcatatagtgaagaaaaagttgcctttccaggcacagttcagtcctgaggcgccttttcacaccatctcatagacatttcagagccaaactctagctttctttttatgactacttttccattccacacttttcttaatgttgcaggagataatttgaaagaaaggaaaaaagaacagggagaacacaaaggcaagaagatgagcaagatgccagatttaagaagtatatttatatttagttctttacaaattaaattctgctgagacccttaaatattagctgtcacaggggttgtgcttgaaaaacttgattccaaccctaagcataaaaatcttgtctaggcagggcagtagattggaggattatcattacacattataggaggaaggccctgttcaatgccaggttccaagaatgccatctcagggagcgagggaaagacataggccaggtaacatgtctgatgtatggagaaaagccctcagggtgccatgttggtggaacaggagcagaaaggaaatcagactgagagaatgaaaactcaatagaagcacaataaacagactgaacaaagtacagatggagtcagttcaagtttaatatgaatgtccctgggccctgtgtttcatcccagtgttaagtgcaggaaatcattggatttctccaaggatgggtctttagagcaaccgactttagaaattgaatactttaaaattattttctataaacaaatttatcaatagaaaaaatagattacttaattggtttatcttaatgagaaaacaacaaaaagcttcaacaaataattgttgctgattggttggtgggttcgttggtgaataatgagaaggaaagaaggaagaaaagaaaagaaggagtagaggaggaaaggaggtgagagagggagatttgaaagggaaatagcggtgctctaagttcacaatttttaaaagcctagagttattaacaaattatgccctcaatcagattttatataacttttttcaatcttgtcatatattaatgtgctgtattcatgaaatgattttgagattttaaagcaatgattgacaatatagtagttcatttaaagtttttacaagttgctgctgacaaaatatgggtaatgaattacatcaaataagtataaatataagtacacgctttgaagttaaaactcagtaagttgttatgattaaaattgttcactttattttcctcctgtgtatgggtttctcataaatggtaacttatacctatgaaaatacagggttctataaagtctgaaaacatagttattatatatcttaacggaccgaagatgtccttcctgatattatgtatagcctgtgtttccagactaagtgccaggcactattctaagttaggcacgattctaagtgttttactgttcatttaggctgtctggctagtgtttttctcaccttatcagcatcccatttttattaagtgaatttgcctaaacacacctgcacacgcacatgcatgcgcgtgcacacacacacactttttgcatttggaagcctggctattatggaactctagaacatgagagctcagggtcaaccaccaagactcaataaggtatggctggggatgtgaccaagactatcctagcatctatggctgtggactgggtgtcttctccactgacccttgaaggtagttttgcttcactgctttagaaatggtgcagagacttaatcttatttcacttttcggtgtttgtcttggttcctgtagaactggcttgaggcttagaagatgtcctcccacctgcatttggaaaaatacatttctaacacttctcctcatatggaaatttttaagtcattgaaaaactcatactgcagcatttgtagaaacaatttcagaacagagtaccttattgcttttcctaaaagaattttaactgtgcatgtataagtattataaatgcataaaatatatagttaatccaaaagacataactatatcatgcatagtagttataggtcacctcagatatattagtaacatctttttatagagactctgttgttatttcactcacacaaaagaataaacacagaattaaggttgaaatttacataagaccagtctaaagccagccatagctatgtaatttccatgattttctcccaatcaatggaaaattactgtcagctgagccaaagtctgcagactgtgagcaaatgtctgtttccttcccacaactgagtgtttgaaacttttttcaatcagtaaaattaccattaaaggtcagagattagtttttcatgcatgatggattccatttgctttaaaagtattataccaggagagtagactttttttctgactttagaatcaaattagaattcaaatattcagagttttgggtcaacctcaaactattttattttgtttattttcccttgacaaaatgttattgttttaaatagggaaggagaaaggtcttgggaaaacacacacacacacacacacacacacacacacacatatatatgtactctctcatatttgaaattagcatgtagtttaaggatactgcacacagctctatgatgagcttaacttgaatctccttagattatgagcattttgaaagcagggacttgattttttaactaaatacctttcatgtttgataacctgttccttttcctgtgtgtattgtcttaactaaagactgcctgcaatgaacagaagggctatggtcttttttttattaagataaaagaattttccaaatcgttgtttataaaataaaagattagaaaaattcacctgtgtataaattgaactagacttctataacatagcagccatcttgtgcagaaaggggctgcttacgtagtttatttctttaacacacagttgctaattacaaaaacagcatgcatccagagattgtgaaaaaagaagttaaaaaaaatcttgcctattattctaccaccgtaacacaattatgtttaacatttttcatatttttaatttattttctctttccataaattctaatctgtctataaatgtactattgtggtctgcttcgttgactaacagaatattttcacccctttcagaaccctttttttaaaaaatggcttcttttgtgtatttgaaacaatttcaacttaaccctattgcatatattctgtaagtagctgtccttcatgaaacagacaactttttcttttaaaaatcaaggagattgtacagaactttgtgattttaattactgcatggcaaactaattcagtctcatatcctttccatttaatagggatttgtccctagctatgtgacctaagcaagctctttaactgtactccacctcaatttgcttatctgtaaaacatggataatattatttttagtctaaaacttcctctggtatgacagaaaagaccaatgtgaaacaattccctgaatttgtcaataaaccatgttacatttataaaaatgcctccagtgtacccagaccagaggaatctgtggcttatactaaaacgtgtattatgtattcattctcaaggtatatgccaacagttaagttagaaatccatccctttctctgtcacttgtccaaagtcaattactccatgcttcttttacataaggaaaactatcttaaaaggaggaagtaagatcacggacaaacaaaagttcataaggtctttcattttactgcctttcaaaaggttaagatcagagaacttagacatgcataagctttggtttgaggaacaattgagtcaaccatcgtaacagagggcctgaaagtatctgaaggtagaatgaatagtttatagtaagccagtccactctcagctctgagaacatccagctgcataacctcaagggaactgcgtggaaaaaattaagggaaattctttgggctttagagcttttcatttcctatgaacaaggcatctcctgcccttgtctcacccatatctccattgtcctcatgtagtcttctgctggttcactgtgtgcctggcaagtcaggttcttacgcgagggaaagagctgttttaagttgtttatgaatagagaaagcagattcagtcagacgtaatctgactctgtatgcctgcaggggttgtggcctttgttagtttattatgcctgtaatttgggaagtcatgctgcagagatgtaaagtgggatgggcctgaaataggtcttgtaataaaaaggcagttagggaagcctgctggtgtcctgcctggttactactatctaagtgcagcaatgtgttagttgattttaataaagagttgaaatcattgttaactggcctccctcccactgagtgaagaaggcagattacacaggcacacgtttrcctcccctagtgtgtactatgaatgcagctgcttctgaagggccagcacgtggccttcttaaaactttccttggctggggttttcccttcttgccaactggtgcccaccaagccagtggatgctctcaacgtctaggcaaatgccaaaaatgtcatctttggctcagatgtgcactggcctgttagagacaactgccatgcagagaaggaatgtcatcagctgctaggtctcaaattatcagcctggattgacagctgcaggatgtagtgcctgcctatagtactgaggccatgacccacctctggagagaccacagcctcatccctagagtagaactggaaattctccattgagacaggaaggcagcacttgaacctggcaggttttggagtgaagtgtctaaggacagaatttctcatttctccacctctgcccatgtgtaaggcagcaatattttcatagaggtgaagaaggcaggtgtcccgtggttattatgacatctgtttacctcattctagtcactgtgccatgtttcacagccattgtcaactacatttggtgaaaactgtttcctccgtccacaactggaacattgacactaaccacattctagagttcattacatagagctgtgtctgtgggtaagttaacaggtagttttaaataactagatatagtcttttcctcttccatgtaagccaagataatatttccacttctccttctgaacatgtgagtacagtttatatataaatcaacagcaagatggaaatttactctgagctttgtgatgttttcactttaagatgctgtagttctgatcctttatacatttatttcattttccccatctcaaccccagtatatagcaacactcacctgctctagaacatgattatcaactgtttcagctatcaatgtaacattaaaaaaaaagttctatgttcaaagactaaaggaacccaggtagtttcttttaaacagaaagactagttttcatgatcataaacatgtaaagaaatatgtcatttttgaaatttcatgaatcttatgtctataccgattccaattccaaactcagactggcaatctgcctttattattgcaaagccccrtagcttgttatcttcatgtacctcttgatcaagtatttaagtgaaataaagagtctaaatgttacgggaggtgagtccaggcagggtctacggccctcagtttttgtcttcctggaagaaaaaaattcagctgagagacagatgtagatttcagacagaagcaaaagtttattgaagcaaagtacatttggaagggaccaagtgggcaactggaaagattgagtgtcccgcctgattattggctcaggactcttataaagttactatttcctgattcttcctgatctcctcccatcatacttccttttgggccagctgttggctaatcgccgcgtgctcagtgacttgccagtaatctgggaggggctgcatgcgccatttggtggttgtagttatgcacatgtactctttgggcaattttcctttactggtctagtgcccccagaggaaggtcatataccagtcaaactttgccattttgccccttactgtgcatgcctgctcaattcctagggttttatcgcaaagttgttgcctacaagcttaagatgtttcctgttaggaaatttccccctccctggtgccagccatgaccatctatcattcctgaagaggccacctgacagtcacaatgacagtcatttgactgtctcctgacattccttggggccctatcctgccctgctcatatccacctatctacctaccctaacatattcccccctcaagagtgtgagactcaattatttggggctagtggatgaaggtcagtcctctgtggctgcttcctgctgaaataagggctgtatttgtcctctgggtctcaatctcttgctaattgtcagaacagaatggtcccatcggtaggtagaattggtgtccagccaggtccaggggaaacaggtgtatgttttcttcacatttgggtagggaggtagatattcctgtattgcagaatttctgctcctcagttcagctaaatccaggttctgtgtcacgaccaggaaaagttaggcatgcagacacgtggaagggtgaggggaatggaatttattatttattgggcgaaaaggaaaacaagaaaagaaaaactttcagcaaagtgagaggggtttctgccagcaggctcccatctcacagattggattccaagcccccacacacgagctaaagttcccaggctctttccccccaacaaggcatgaacttcctggtagctttaccccatcgtcgcagtgcacaggcgggcgggagattctccagggatcctccctcttatctgcctcctgcatctatcacctgcattattgggaacttggtttgaaattgttatatcctggagaagacaaatttatctagtaggttaaaaggcaggggccaaaaagaagtagacgtatggagacagctggttcgagcaggggaggaaccatgtgagcaatgggagagcagattttacagagttccagatggaatctgctgagggattttctttcccagagtcatgaagccacttagcgtggtcacagattctctttatatgttcctctacttgcccactattgttgacacaagtgcaatagggtttattgatgacagcacagacgactctgttctgcaaggaggtaatctagagctagtctgttgtccatgactgcattagctactgaattcagtgaagccttgagtttagagattctgttcccagttctctgacctaggtctccaatttgtgtagagaggttttggagggtgactttatgataactgaatcctctgtatggggcagctaatcctatggcagcccctagccctaccattataaggccaagagctctccttttttaagaatttgtaatgttatagatggttacacctgttccttgtggccccaggagtcctagggcacatcccctgtatgttgggtgttatctatgcagataaaaaggtttacaagtgagggggttgaataagttcttttagaacttccctcacagggcagtttattttgtttaggtccatataaaaatacatagcctggaggggtgtaggcccactcgggaatgttggttttgaaccaagtgtaagcataagcaatcccaccatgaataagatccagagtactggggctaccttatgctgagctagcattagtttgaaagaaaagaaggcattacttataatttcattgaaagagatattatagatcttccaatgactcacaggaatactcaggtgctggtcctattgttgattgttcagaagcctctcaaggttttatttaggaatgatgtatccaactagaggtgccaggaactttgatagctgttgcagtggaaaggaaaacagtaaaagggcctttccatgaggggattagttgagattttgtagatccatcactttaggttttaataaggacctgggtgggtacacaagttggttgttagagggtctggagccagcagtactctctgtatatatatttggttctaggtatgaaattctctgtcttggatttggatactttgtaccttacattttgctaggaagkttaaggtttgtactgcatattgttgtgcaagctttatggagggggagcagatgagtaagccatctacatacagcagaagttgtccccactcaagatatagcttggttagatttctttgctgggtcttgtccaaataagtgtggggcatctctaaaaccctgaggtaggactgctggctttcctgggagaaactgggatattagggggaaatatcagtccagatgttgggtaaatattaagtggatacccattttggaaagtatattcctactcaaaagcagtgtgaggcatttagacattgccagggactagtgggagaatagtaattagtcccataagcaatataaataaaggggatgtgaatctttagaggaaggggttgctacttgctcctgttacccaacagaatttgggggtaagttgcctagagaaaaaggttagcacaaagtaggcagttcttgtatttaaaaggatatttatagcactacctgtcatttccagagtttcccttggctctgttcctttaatgatgatgtctgatttggaagctggccagagtggagggccccttcagctcaaggccattattggatgggggttcaactgggggaccttttggatcccagggcagtccctcttccagtgggacttatctccagcttatcacaaagagggcaggctgtgtggggcttcctcccatttggcccatttggaaaattccttctccagtagcctggtcttctgcatcagtggcagttacctggaggagggtccttaggagaccctggagggggctggtgggcttgtaaagcagccaatagttgagcctgcatcttgtccctgcatttctccttttccttagccctgtcctccttgtccagatctcagttataaaagactgaggaggctaatttgaggatttgtggcataggggcactgggttctaaggctgacttttgtaaattttcctaatgtctggagcagcttgggtaaattgtcctttaggactagtccctcaggagattctgggtttaagtttggtgtgcttaataagtttcctgtagacttttcagaaaggctataggatttccatttggcccctggtttatggtggctaattattgtagtttagaggcttgatcttacttcattttattacctctattagacacaagagcctatggttcctggcccatattcccgctttggcattgtagtcctgattggggtccagctggggaacagctgtagcccctccagggtagttggcattttccaggtgtaagtcatttcgacagtggattgctgctccgcagatggtctgtctttcctcttgtaaaagggcttgtcccaggagtacatttatgtccttccaaattaatctaaatgtaagagccaatttggggaagccctctatgagccttttggggtcatctgagaacttttttaggtttttcctaagttgtcaaaagtcgtacatggaaaaggggatctggacctggacgagttcagttggctcacttacctcctacaagcttggagaggagaactaaggagcccggtgtaaagtggggccaattccaaaggtctgggagtgggataaatagggggaggatccaggggtggctgtttctccctctttcacctccaaaggaggaggtagtttttccttttggcttctggaggaagaaatgttggagaggaatcagcagaggagtctccagggccgatgcagggccctggaggagatggctaagcatagctaggatgtgaggtttgccttacaagctttacgaggattagggtcttccctttaggccataaaggtttgtaaataggggacctctggctttttgccctgataatggcagaaaaggtctagccggagaatggtattaaaatttgtacttccattctctagccagacttcctctgcaatgaaaaattagttttttcattttagggtttggtggttggatttatcgcagattttaaggatgcatccaaggggtcagtcccagagtatggagacaccgttatctatctgcaagacagaacagggaagagtaaggaagaggaaagagtcccttcttcttcatcttttttctttttctgtttttttttttttttttttttttttttgagacagagtctctctctgttgctcagctggagtgcagtggtgcaatctcagctcattgcaacctctacttcctgggttcaagtgatgcttgtgcctcagccttccgaggagctgggactacagatgcataccaccaagcccagctaatttttgtatttttagtagagacggggttttgtcctgaactcaggtgatccacccgccttggcctcataaagtgctggaattataagcatgagccaccacgcccagctgaaagcattccttcctgatccccttataccttggatcagagtagtgagtagggcatcccccattcatcctggagttctggaataaaccagtgattaccaggtaccactaaccctggtcccacatttccctccaggaccagccttcatctctctgctaatggtaatctgtcctgcacctgtggcctctggctgacctgtacctttgacactgtgatcttacagtgacctttgtttggagcattccagcaatgaaatggttttcctttctctcaaattcccattctccatatccctttaggtaggtgaggatcttatccctagccagcagctgtaagggaactgggccttcctttctctggacatagcactgtaggtcccagtatatgttaagaatgtagatggtcagaggaacagaggaaaacctgcatctgagtccccttgtcatccctcctgtggattcctggggaagcatggaaaacaagtatttaaaatgacaggacaatccatctgccacccgtgggaatggtagaaaataagggatattcatggaaggctgcttttgtacagtctcacaaacagcagcccttagacctaagaggacattgcctatcagtcttctcagtgtagaggaagaactgtcagggccagggagtttgggatgagagaccacaaaaggcagagaaagaattgtcctctccccaaagtgcagatagctctagaaaggaagtaggagttgctcttaatggaccacatacagatgccctatggagacaaacaaatgacctcaagagccactggaaaacctggtctcaatgtgtagcaggatttaaaaattcatgataggaaataaagaattggtggagacagagtcttcccaatattaagcagagaaagaagttgcatgatatgcagaatagaagcagggaagaggttgacttgcccccaagacagacagtgtggccagcatataaggccatctcaaagtccacagaaaaaaaggaagcataatagggtgtagacttattggggaaaagtccactttggttaaggaaatgaaggtctccagtctttgaatggcctaggctcaagccctatcacccttgtgagccacctgtccaaaagggccacagtgacttaggtctactcagtacagactctgaagtcctccacctctgctgtcgcccaccaggatgaactgaggaatctgctagagggaagagtgaccaaagagaatttttctggagatgggctggtgagtgagacagcaagagaaagaagacctcacgtaagcagagttgggtgcctccagccaaagatggcaaggcacagagggtcttaccgagaagctgcaatctgattcatgacaccaaaatgttactggcagcgggtttgggcaggatacacagtctttggttcttattgtctgagaagaaaaaatacatccaagagacagaagtagatttaagatggcagacaggaggcaggactagattgcagctctggacagagcagcatgtggaggctcgcattgtgaattatagctccagattgactgcaagaacaaaccagcaaccttgagaggacccacacaccctctgaaggaagcagactgctcttgcaggacctgggaaacaccccaaatactgtgagtaccccaactgtggaagtgggaaagggagaccctcctctcctgaacacacacccccactggagaagctgaaggtctgtttgcaagagaagtttctgactttacctggagctgagtcaatgtggagagctgagtgaaatacagaggcaaagaaagtagcagaaaggccctggaagctctctgagtcccctagcaggccatccatgcctggcatcacagggatccatccagagggcagccagagccagaggtgcaaggggtaaaactctacagggagaagaaaatctctagctgaagtttgtaacaatttgaatggggtgagaagcctcctggccagaactcaggggagggcacacatctggcgtgcagactccacaggtggagtagaaccaatccctttcattcacagctgggaggtgggtagcctggggcagattttcaagctcatcttgccctccaactgaaaatggactcaggctgttagagggtgggagacacagtgagagtgagactagccatttggtttgggtttgcgtggaagcagagtgaggcctgtgactgctggctttcccccacttccctgacaacctgcatgactcagcagaggaagccataatcctcctaggtgcacaactccagtgacctgggaatctcacccccatcccccatagcagccctagcaagactcacccaaggagagtctgagctcagacacacctagccttgcccccacctgatggtccttccctatctaccctgggagtggaagacaaagggcatataatcttgggagttctagggttcctccccatactaccacagctgatgctctctggaaggcaacacctcctggcaggagaccagccagcacaaaaatagagcattaaaccacgaaagctaagaacccccacagagcccattgcgccccccaacccctaccccctgcaccagaacaggcactggtaacctataaaggaaaatctgtgagattaacagcagatttctcagcagaaagcctacaagctagaagggactggggccctatcttcagcctcctcaaacaaaacaattatcagccaagaattttgtacccagtgaaattaagcatcatatatgaaggaaagatacagtctttttcagaaaaacaaatgctgagaaaatttgccattaccaagccaccactacaagaactgctagaaggagctctaaatcttgaaacaaatcctggaaacacaacaaaacagaacctcttttttttttaaattattattattatactttaagttttagggtacatgtgccatgccggtgtgctgcacccattaactcgtcatttagcattaggtatatctcctaatgctatccctcccccttccccccaccccacaacagtccccagagtgtgatgttccccttcctgtgtccatgtgttctcattgttcaattcccacctatgagtgagaacatgcggtgtttggttttttgttcttgcgatagtttactgagaatgatgatttccaatttcatccatgtccctacaaaggacatgaactcatcattttttatggctgcatagctttccatggtgtatatgtgccacattttcttaatccagtctatcattgttggacatttggattggttccaagtctttgctattgtgaatagtgccgcaataaacatacgtgtgcatgtgtctttatagcagcatgatttatagtcctttgggtatatacccggtaatgggatggctgggtcaaatggtatttctagttctagatccctgaggaatcgccacactgacttccacaatggttgaactagttgacagtcccaccaacagtgtaaaagtattcctatttctccacatcctctccagcacctgttgtttcctgacttttgaatgattgccattctaactgatgtgagatggtatctcattgtggttttgatttgcatttctctgatggccagtgatggtgagcattttttcatgtgttttttggctgcataaatgtcttcttttgagaagtgtctgttcatatccttcgcccactttctgatggggttgtttgtttttttcttgtgaatttgtttgagttcattgtagattctggatgttagccctttgtcagatgagtaggttgcgaaaattttctcccattttgtaggttgcctgttcactctgatggtagtttcttttgctgtgcagaagctctttagtttaattagatcccatttatcaattttggcttttgttgccattgcttttggtgttttagacgtgaagtccttgcccatgcctgtgtcctgaatggtaatgcctgggttttcttctagggtttttatggttttaggtctaacatgtaagtctttaatccatcttgaattaatttttgtataaggtgtaaggaagggatccagtttcagctttctaaatatggctagccagttttcccagaaccgtttattaaatagggaatcctttccccattgcttgtttttctcaggtttgtcaaagatcagatagttgtagatatgcggcattatttctgagggctctgttctgttccattgatctatatctctgttttggtaccagtaccatgctgttttggttactgtagccttgtagtatagtttgaagtcaggtagcgtgatgcctccagctttgttcttttggcttaggtttgacttggtgatgcaggctcttttttggttccatatgaactttaaagtagttttttccaattctgtgaagaaagtcatgggtagcttgatggggatggcattgaatctttaaattaccttgggcaatacggccattttcacgatattgattcttcctacccatgagcatggaatgttcttccatttgtttgtatcctcttttatttcattgagcagtggtttgcagttctccttgaagaagtccttcatgttgcttgtaagttggattcataggtattttattctctttgaagcaattgtgaatgggagtttactgatgatttggctctctgtttgtctgttattggtgtataagaatgcttgtgatttttgcacagaacctctttaaagcgtaaatcacaaaggacctgtaaaacaaaaatacaagctaaaaagcgaaaacaaaacaaaacaaaagtatacaggcaacaaagagcatgatgaatgcaatggtacctcacatttcgatactgacattgaatgtaaatggcctaaatgctccacttaaaagatgcagaactgcagaatggataagaactcaccaaccaactatctgctgccttcaggagactcacctaacacataaggaccaacataaacttaaagtaaaggggtggaaaagactttccatgcaaatggacaccaaaagccagcagaggtagctattcttgtgtcacacaaaacaaactttaaagcaatagcagttaaaagagacaaagagggatattatataatggtaaaaggccttctccaacaggaatatgtcacaatgctaaacatatattcacttaacaatggagcccccaaatttataaaacaattactaacagacctaagaaatgagatagacagcaacacaacaatagtgggggacttcagtacttcactgacagcactagacaggtcatcaagacaaaaagtcaacaaagaaacaatggatttaaactgtaccttggaacaaatggacttaacagatatatacagaacaactgcaaaatatacattctattcaacagtgcatggaactttctccaagatagaccatatgataggccataaaatgagccttagtgaatttaagaaaattgaattatatcaagcactctgtcagaccacagtggaataaaactggaaatcaactccaaatggaatcttcaaaaccatgcaaatacatggaaattaaataacctgctcctgaatgagcattgtgtcaaaaatgaaatcaagatggaaattatacaattatttgaactgaacaacaataatgacacaacttatcaaaacctctgggatacagcaaaggtggtgctaagaggaaagttcatagccctaaatgcctacatcaaaaagactgaaagagcaaaaaagacaatctacagtcacacctcagggatctagaaacaagaacaaaccaaacccaaacccagcagaagaaaggaaataatcaagatcagagcagaactaaatgaaattgaaacaaaaaaaaaccatacaaaaaaataaataaataaatgaaacaaaacctggttctttgagaaaataaataaaattgatagaccattagcaagattaaccaagaaaagaagagagaaaatccaaataacttcactaagaaatgaaacaggagatattacaactgacaccactgaaatacaaaagatattcaaggctactatgaacacctttatgcacataaactagaaaacctagaagagatggataaattcctggaaaaatacaacactcctagcttaaatcaggaagaattagatacactgaacagatcaataacaagcagagagattgaaatggtacttaaaaaattatcaacaaaaagaagtccaagacccgacagattcacagcagcattctaccagacattcaaagaattggtaccaatccttttgacactattccacaagatagagaaagaaggaaccttccctaattcgttctatgaagccagcatcaccctagtaccaaaaccaggaaaggacataaccaaaaaagaaaactacagatcaatatccttgataaacatagatggtaaaatccttaacaaaatactagctgactgaatccaacaacatatcaaaaagataatccaccatgatcaagtgggtttcataccaggggtgcagagatggtttaatgtacacaagtcaataaatgtgatacaccacataaacagaattaaaaacaaaaattccatgatcatctcaatagatgcagaaaaagcattcaacaaaatccagcatccctttatgattaaagctctcagcaaaatcagcatacaagggacatacattaatgtaataaaaactatctatgacaaacccacagccaacgtaatactgaatggggaaaagttgaaagaattccctctgagaactggaacaagacaatgatgcccactctcaccactcttcttcaacatagtaatggaagtcctagcaagagcaatcagacaagagggagaaataaagggcatccaaatcggtaaagaggaagtcaaactgtcactgtttgctgatgatatgattatttaccttgaaaactctaagaactcctccagcaagctcctagaactgataaatgaattcaagaaagtttctggatacaagattaatgtacacaaatcagtagctcttctatataccaacagtgaccaaggggagaatcaaatcaagaactcaacccattttacaatagctgtaaaaaaaataaaataaaatacttaagaatatacctaacaaaggagtcgagagacttctacaaggaaaactacaaaacactgctgaaaggaatcatagacaatacaaacaaatgggaacacatcccgtgatcatggatgggtagaatcaatattgtgaaaatgcccatactgccaaaagcaacctacaaattcaacacaatccccatcaaaataacaccatcattcttcacagaattagaaaaaacaattctaaaactcagatggaaccaaaaaagagcctgcatagccaaagcaagaccaagcaaaaagtacaaatctggaggcatcacactacctgatttcaaattatactataaggccatagtcaccaaaatggcatggtactggtataaaaatagacatatagaccaatggaacagaatagagaacccggagataaacccaaatacttacagccaactgatcttcaacaaagcaaacaaaaacataaagtggggaaaaggataaccttttcaacaaatggtgctgagataattggctagccacacataggagaatgaaactagatcctatctctcaccgtatacaaaaatcaactcaagatggattaagggcttaaacctaagacgtgaaactatgaaattttagaagataactttggaaaaacccttctagacattggcttaggcaaggatttcatgaccaagaacccaaaagcaaatgcaataaaaacaaagataaatagctgggacctcattaaactttacgagcttttgcagggcaaaaggaacagtcagcagagtaaacagacaacccacagagtgggagaaaaatcttcacaatctatacctctgacaaagggtagtatccagaatctacaaggaccccaaacaaatcagtaagaaaaaaacaaacaatcccatcaaaaagtaggctaagggcatgagtaggcaattcacaaaagaagatatacaaatggcaagcaaacatatgaaaaaatgctcaacatcactaatgatcaaggaaatgcaaatcaaaaacacaaaatgtgataccaccgtacttctgcaagaatggccataataaaaaaattttaaaaaacagtagatgttggcatggaaggggtgatcaggaaacacttctacactgctggtgggaatgcaaactagtacagccattatgggaaacagtgtggggattccttaaagaactaaaagtagaactaccacttgatccagcagtcccactactaggtatctacccagaggaaaagaagtcattatttgaaaaagacacttgtacacgtatgtttatagcagcacaattcacaattgcaaaactgtggaactaacccaaatgtccatcagtcaataagtggataaagaaactgtggtgtacagatatatatacaatgaaatactacacagctatgaaaaggaatgaattaacagcatttgcagtgacctggatgagattggagactattattctaagtgaagtaactcaggaatagaaaagcaaacatcatatgttctcactgatatgtgggatctaagctatgaggacacaaagatataagaatgatacaatggactttggggacttggggggaagagtgggaggggggtgagggataaaagattacaaatatggtgcagtgtatactgcttgggtgatgggtgcaccaaaatctcacaaatcaccactaaagaacttacttatataactaaatataccacctgtaccctaataacttatggaaaaaaattttataaaaagtaatagatttaagtcagaagtttattgaagcaaagtaaagtacattcggaagggaccaagtggaaaatttaaaagattgagtgccccgcttgatcattggttcaaggcttttatagagttactgtatcctgattcttcctgatctcctcccctcatccttcttgggggaactgttggctaatccttgcatgcgcagtaacttgctaatatctgtcaggggctgcatgtgccgtttggtggctgaagttgtgtgtatgctctccatgacaatttttcgttactggtctagtgcccccaaaggaaggtcacatatcaggcaaactctgacgttttgccccttcttgagcatgcctggacatatccccgaaggaaggccaaactccgccattttgccccttactgcagatgcctggtcatgtttgcttagttcctgggatcttatgaggaagttgttgctcataagctcaagatgtttcctgtttgggaggaaattttccccttcttggtgccagccatgaccatctgtcattcccaaggaggcccctgacaattgcatgacagtcacctgactgttgcctgacattccttggggcactctcctaccctgctcatatctgcctatctgcctaagtaacatgaagacattttaaaccttctcagtggttctcccatttcttctctctctctctcccccactttcccttcaaaccacctcaaaactcctttctatttctactcagcaaaatggagattaaaacctcactaaaatgtgtctttgcccacccctgccttcccatttcacagcgcacttctttcttcaaacagatttagatttacagaggaaaaaaggcagaaattctctttaccggcttcagacacttaaagaaaatctgtccttttcatctctacacgttaaaatatttgctataataagtgtagattcaagagccatttggacatatctggcttttaaatagtgttgactaatgaccaacttaacttagatctttgaatctatgtgtggtgttatgatatatattagttttcatctgaggtctagctcataactcccacagcccttgttacagtcttttgttataatgttgggtgtgttaggcctcaggggcaggcccctgaccttctccttctctcctttcacctgttcctgcctttctgattgtggcttttaagaccttccccagagagagtactgccctataccctgggggaaggaatgctgatgtcatgaagcctccataaaatcccagaaggacagggttcagtgagcttccacatagctgaacacttggactttcatggaggttggcacagccaggtaaggcatggaagctccacaccccttcccccatacctcaccctatatgcatctcttaatcggtaacatttgcaatatcctttataataaactagcaaacataagtaagtgttcccctgggttctgtgagccactccagcaaattaattgaacccaaagagaggattatgagtatgccaacttggaggtggccggttagaagctccagaggcccacacttgtgactggtgtggtggggggcagtcttgggaactgaaccttcaaccggtgggatctgacattatctccaggtagacagcgttggaactgaattacaggacacccagctagtgttggctgcttggtgtgggggggaaacctcacatgtttgttcgtagaaggcttcatctgtgttgatgatttttgtggtgtgagagtagaggaaaaatgccatcagggagagttttctctacaccctatagctcctagatgctttttatttaagacattcaaaccttgtgaaaaacaaacaaacacaaaaatctttttatttaagacggtcaaaccttgttcaaaacagcacagacattaactcggaatttaggatttattattgattaattgacattatcttcagtctgttcatattattaagtgatataagtcaggtacacacacacatgtatggggagtgtgtgggagtgtctgcatgaagtatactgtcagaaaatatactcatttcaaagaaacactgatttaggccctggcaaataaggaaacatttctatttcttctagaaataacacattcatttgccaacatctgatctatccatatgacctcttaatacacacatgaaataataaagtgtatttttcattcatttaataagcatgtgattcacgtgacactgtaagccttttttttttttttttttttttttttgagacagaccctttttctgtcgcccaggctggagtgcagtggtgtgatctctgctcactgcaacctccacctcctgagttcaagcgattctcctgcctcagcctcccaagtagccgggactacaggcacgggacaccacgcctggctaatttttttgtattttttgtagagacagggtttcgccatgttggccagactggtctgaaactcctgacctcaggtgatctgcccacctcggcctcccaaagtgctgggattaaaggcgtgagccactgcgcctgggcgagcatttttttttattccagtgtttctcgttaatctaccccatggcgttttatttcaggttgtatgtatgccagagatgaaaaaaggcaaatgacagaagagcaagtatatggagaaagataggagggacttgagaaaacttggcaatttactaaaatgaaatggcattgtttccatatttaccaaaaacagacaaacaaacctaatcattcctctcattttgatcagctttcatgtatattttctaggcctaatcaaaatcttctttggtgtcacaaaataatggaagagacatgtattggtttaggctcctgcagcagtagaccccaatataaggaatattagttgtttatttaggaaattcaagaaacctaagtaaaggagtagggaagtgagacaggaaatggaaggatctctgaaaaaatacacatcatcaagtccgttcccacagagggaaacaggagctcagtccccattgttgggttctggaagacagtgtggaacagaccccagagttatcccaactgtgagatgaggaagctggggtgcttttcaccaactcttcatccatcacctgcttccgggggtcattaacaatccaccactcccaggttatttatgctcaggccaggcatgtaactgcagccagaaaatagcccttgccaagactcacaggaattaaaaaccttcaggcaaggagctactggtctttgtaataataagctttgagaggcgggtattcagaggctatgggcaccaataacttcccttatgtgagtcataaacacaaagttaattttgtttgcatgtgtatacaagtattttgaatgaatgcttctctttgttttgtgtgtttggaaaatttaaacaaaattattattgtttttgtattggtatttaaacatctgaatatgtaacatcaaagatgatattaaaaagtataaagcaaattatcacaaaatcagatgtgcagttacatgtttacttgaaattctctctagactacatttgaaataggagcttccatagggggaaatttaaattttttttacaagttgtttaattataatgtgctttaaaaacactttagcatatcataaaccttcaaaacaaaatgagtaatcatcttctgagatccatagaaaatgtttcttaaatgtcactttcaattaccacttctggagctaacttgcaaaacaattgtgtttccaccaactgaaatatgttttcaccaaatttaagataatctgtggtcagtgtgagctttgtcttgatttaggaggaggaaagcaaagttccatttatgaatactttgaaaattttcagaaattctcctaaattgtttcagcaaccaggccaaaagagaggcctggaatcccaaggtgagaggaaactttaaaagttacacttatggccaggcacggtggctcacaccgtaattccagcactttgggagactgaaatgggtggatcacttgaggccaggagttcaggaccagcctggtcaacatggtgaaaccccatctctactaaaaatacaaaaattagcctggtgtggtggtgcatacctgtaatcccagccacttggcaggctgagacatgagaatcacttgcacccaggagacagaggctgcagtgagtgagatcatcccactgcactccaacctagacaacagagtgacactctgtctcaaaaaaaaaaaaaaaaaaaaagtttcacttgtgccttggggttggctgcctgctatcatatttttgttgtgttcttctaccccaagctccagtacctcccctcacagaaatcacctctcctaccaaccccaagggaacccattccatttttattagagagttcttctttacatggcctcaagtcttttcatcaagatttactgatagaataacagtaaatccacattactccaggtgtctctttgcccttacctagcctttgtgtctatgccattcttctcaaggaaattgccttcctttatcagctttaaaagtccatatttgggatcccctctcctggaaacattctctgactatccagcccagataattttttttctctgctttctcattataacattcatgatctgtgtcattcattcattcattcatttgcccaatatttcttgagtgcttcctaagttcaggcactgttctaggtactggggacataggaggatagaagccagtcaaattttgcactcactgaaactttactttagtaggtaagaatctatagtttaaaaaaaaattcacatatgaggcctgtgaagcaaataaagcaataatgtggtggttttcatggacattatgtctttcactacccgtccctctttttgttgtaaactctctaaggcaagtataacctcatctatacattagtatttatttaccacaaggacccataagtatttattgatatatcttcctaagtatgtgataatattctaaatagatagtagatttaatcattgggatttatgtgaagttggattaaatagataacatgataattacatttagtattgcatggaaggacacattttctcacttatagaagcctaaacaaatgtcacaatgttgatagattcctttataggatgttaactctgaagctgtcgtgaaaatgtgtgaactagtttcactttcaacttgatccttttggaatcatgacagattttgctagcccttaattcttctgcaatctttgttgatccctcctatttcaatctcataagacacttatctctcctccagaaagatctgaagggttaagtcacctatttatacctaattacagtgagccctgtgttggatttttaagggataaaaggaagtatcagatctcagttaacttatgtactgtctacagtgcctaacaatgacacaggatgactcagttaaggagaaaaatactccatttatcagcacagaattcttccctttaagctatcatatggtagctaaccttgcctaaccttgcgagtttaaccttgctttttacgtgcatgcacgcgtgtgtgtgtgtgtgtgtgtgtgtgttactaatttctaactgtaccagctcctgaattaatatttggcaacatcaatattccttgtataatgaagaagcatggtccaagagacttggatgtgacctctctaaacatcaacttacagctgcaaaataaggaataagttgtaattattccttatttgtaacaactaccttacagtgttgttttgaagattagaagagaatatatagatgaagtacccagtggacagtaggtattgaataaatgttagtttccttccaccttctctggcttatgtaacaaaattactcattctactagtcactcagactttagttaatcattagctaaagagtaacaatgcaggattttttttttaataaattggctaggattggttttatgcctggatggaataggcacttgccatttcatcacaattcaaaattcctcctgaaggcctgaaggcctgaaatgtttaccattggaaactaatcccactgtatggttactattatttattatatctattaacttataaaatattaaaatataaagtaaatattaccctactgatgcattagccactcaacataaatgagtttcttggagattaataaagcagtacatcagtatgtcccaaacaatggctaaaaggaaacctagtaaccaccccgaccccaaacttgttttgttaggccagtcagatttttttttttcattttgaattagcatcacgattgaaagtggaaagatctcacatataacttcacatttctctgtacaattgagaaacgttggctatgttggctctctgaatagcagctacctcctttcaaggtttgtatttacaatatttcccacccccatgagtccttattatcctgacactgaggacaaatatgagttgctgtccatcagcattccaaagctgtttttttttttgttttttttttcttacacttagcctacttcactccctaacaccaccagcctgatttctgagggggcctgaggtaggaggaggagaatggagagcactttctctgagagccgccattttaacagatcattaaagacacgatattcacatgacggttgcttactctctgatgaaaactacaaaaacagaatacacagggaaggtaatctgaaggtgatacctttttcctatgatccttggccttataaccactaatcaagcctgagggccgaagttcctgcctcatctctgcctgatgttacgaactaggcaggctagcagaggcaacaggcaacctgggcacctgaagagctacctggataacctagaagaacagtaggaggttaaagatgaggacaagtctatcaaaacaaaagcctgtcaagaccagaaagagaaagtcacacttttgactttacagtttgtgctgggctgacacaaaggcctcagttaacaccaaatacaacttccatagacttcaagtttccctcatatttttcctgggtcactattccagagttgagaaactgaactacatctaatattttattaaaataaaattgaagattattagaaaagtttattagtcaatagtaaaacgttatttggttagctttcttaaacaatggcatttatagatatctgattatcccaacaaaaatcttcaaatggttcatggacgctttgtcaagcttttgtgccacctgagagaaaaaaagataaatggggaggtataatgttaattttgtagcctttgcttaatgtttatttttgaaatgcctatcattttctatcagtatctgaaactccatggatttctattagccttcaccaataattacatttgaaagcatccagaagagacaatccttaccacagtctcttttaaactcttaatggctgtcacaaaattctatttttcattttctctaagagcattctattaaactgttcctagttattagctttcataaaggcacacagaaaatgtttcctctacagccacaaatattcctaaagcagaatcatagtaaaacagctgtgataatgttttattcattccagaatcctaatgattgaacaaaagagagacagtcttaagagttaacatctattgagtccgtgactgcgtgcattgttctttcaagtattttacctgcactatttaatgtaattctcccagccactctgatttcactcattttacaattgaggagactgaggcatagaaaactaaagcaatttggctggagtaagggccaggttgggacttataccttggcggtctgcctacaaggtgttcctcaccaccatctgacactgctttctctgtgtagcccagagtgtcagcctcagtgcttcaacttgagctttcaggatctatttaaagatggaaaatatagttacattatgtcaccatttgagatgcagaaagacagggccaccattttgcacaattctgaaagcacaattcatgctgtggtttgtaaaaatggtactccctagagttgggcaatggacagctcacacagagatgcagtggccctgctaaactaatgccttacataaaagagttttactcttcattcccttaaatgattcttagtaacactggctgacacacacacaaaacagtttctaagtaggtctgtccgcatactatgatcactggtcaacattaagtttccacaattaattttacataatccaaagactgccaagcagtttatctgggtaaactaaacattctgtagtcatttattctgcttccagtcatgcccagcaacaggttgagaagacaaatgttctcagaaatgatctccaaggagttgggagcaggctgcttatacgtctaattcaccagaataggtgagcgtggtcgtggtgaccttttcatactgttgcagagctgagtatgaagagatgactcacagtcctccaatgcaacacaggtgaccctgcagccagattttgccttcagtggtatgtgactcccatggggtcaggagagtatctcagacattgaaatttgacctaatggcctacctacctgcacacgcaccctgcccacttacagaagggcaagaactctgcattactgaggccttgttattattatagttcctatttaggtaagaacgcaatggagaaaaaatgcatttggttattgggcctctgtttgaatatcctgtgctttttgccaaacaatgcattctacataatcttaaaaaacaaagtccatttcaaagaacaaaaataatgaccatatccactgagcaattgagcagaatgggaatcggagttttaaactctgatatatctgttttccttagggctgaaatcttcttttcatggttctagtttctctaattgaaataagaacctaaccctgttcaaaactacatctctgggaatgagtgaaaaattaatgatcctcctattttgttggatcataataatgactctcatcctggtggggccaccagcaatgctattcttctcagactctatcttagttcctaagccactcaccaggtatttaaaagaatgatttaacacaactagaatcatttaaataactgtattttttaagaaagccatattattgctttagtttggtcattcatatatccaaaccttggactcatcatcttgcaatctcatgtgttcagttattccagagaaaacattaaggagaattgtattcttcttcccagctaaattttaggtcctcaaagctggcaaccacaatttatgctttctaaaaatcatctatgatactaagtatgagctggatcatgaataaaacccttgtaacaataaatgcttgatgacttacttcatctcattagcaagggaaggtaactcataattatcaaggtactacaggaaatagggcactatctggaaatgctaaatacatctccttgcatgaatcacttcttaccagaattccctttctttccagatcccacctccagggttctgtggtccataccaggcactacattcctcaggggctacagcctatgagcgtctcatggggctatgaaaccatttgagacctggaaaatgaagtaattgaatacaaacagaaaactgcaaaatgaggactaacatttaattaaatgttcaaagcataagattatgtcgacttcaataattgtcaaatgagtattcttaacattttactaaattaaaaaaacttatgtgctgagttttttattttacaagtatctccaagtatgctggatgattgcaaagaaaatcaaggccagtcattggttaaatgagtttaatagtagccacataatttcaaaagcaaaattataaagacccttcccagactgttgatagcaaaaataatctacgttgtggaaagtgggtccatgttaatatgttagatataagtagtgaggcctaaaaaggtattaaaacatctttgcttaaggtactacctatttgcaagattgttattttaaaaatagcttatgttttaaattgttattgctttttatcactctaataagaatttatagttgctgtaagataacaagaaaaaggttaactatctgcagagatgcctgagagtcagccagggagtaacttaaatcctgcaggaatctgactcactgaagactgtcaactgaatgaaggcttaaatttcatggtcttgggtgggagaactttttcatattctttccccatatggaataacaatctgccctgaaaacagggagtattttggcatgatctctttttgcttatttgccttccattttccataaagcaacttttgccaagcaccatacttaagactcaacttttttgcaaaaatatcagacaaagcactgtctttaagaacacagagaacacactagatcccttcttctgaaaatcactgttctatgttgtttgtggatatttttttagcattcactgcatgcctggaatgaataggctgtgtttctccccaaaagagcacaaattaatatacaaggtcaggttaaatagttaagtctgctttcctatcccttatacagaagctatccattcaaaaaaaaaaaaaaaaaacttctttttactttttttaatttttaattttggtgcatacatagtaggtgtatatatttgtggaatacatacaaacatacaatgcataataatcacatcatggtaaatgggtatgcatcacctcaagcatttatcctttttttatgttacaaacaatccaattttaccctataattgcttaaaaaacatacaataaattgttaactatagtcaccctgttgtactatcaaatattagctcttattgattctatctaattacatttttttatacccgctaagtatcccacccttccctccacgctaccctacctaacctccggaaactgtcttctgctctctatctccttcgtttgttttaatttttagctcccacaaaaagggagaacatgtgaagtttgtgtttctgtgagtaacttatttcacctaacataattatctccacttccatccgtattgttgcagatgacaggacctcattcttttttatggctaaatagtactacattatatatatgcaccatattttctttatctatttgcctgttgatagaaatttagattgcttccaaatcctggctattgttaatagtgctgcaataaacatgggagtatagataactctttgatattttgactttctttcttttgggtatgtacttagcagtgggattgctagatcatatggtagctctatttttagtcttttgaggagtcttcaaactgttctccatagtggttgtactaatttacattcccatcaaaagtgtaccagggttcccttttctttacatcctcaccagcatttcttattatttgtcttttgcataaaagccattttagctggagtgagatgacatctcacaatagttttgatttgcatttctctgacgatcaatgatgttgagcaccttttcatatacttgtttaccatttttatgtcttcttttgagaaatgtgtgttcagatgttttgcctatttttaaatcagattaattttttcctgtagagttgtttgagcttcttatatattctgattattaatcccttgtcagatggatagtttgcaaatatttcctcccattatgtgggttgtctcttcactttgtcaattgttcctttgctgtgcagaagctttttaatttgatgtgatcctatttgtcccatttgtccatttttgctttggttgcctatgcttgtagggtattacttaagaaattgttacccagtccaatgttctagagactttcttcaatgttttcttttagtagtttcatagttcagagtcttagacttaagtctttcatccattttgacttgatttttgtatatggcaaaagatagaagtctagtttccttcttctgcatgtggatatccagttttcccagcaccatttattaaggagactgtcttttcccaaagtatatacttggcgcctttgttgaaaatgagttcgctgtagatgtatggattcatttctgggttcaaaactggtattccagttttgttctttttgctcgggatacctttggctattttgagtcttttatagtttcatataaattttaggattttttttctatttctgggaagaatgtccttggtatttttatagggactacattgaatctgtagattgctttgggtagtatgaacgttttaacaatattgatccttccaattcatgaatgtggaatatctttccatttttttgtgttctctttttttccattagtatttgatagttgatagatcattgtagacttttttggtttagttaaccctaggtacttaattttatttgtacctattgcaaatgggattactttctccatttctttttcagattgttcactgttggcatgtagaaatgctactaatttttgtatgtttgttttgtatcctacaactttgctgaatttatttatcagttctaatagtgttttggtggaatcttcaggtttttccaaatttaagatcatattttctgcaaatgggataatttgccttcttcctttcaaatttctttctttggtctgattgttctagcaaggacttccagtattattaatatattgaatactagtggtgaaagtgggcatccttatcttgtcccacctcttggaagaagagtcttcagttataccctattcagtatgataccagctgtgagtctgttatatatgacttttattgtgttgaggtatttccttttatacccgattttttgaggatttttatcatgaagggatgttgaattttatcaaatgcttattcagcatctgttgaaatggtcatatggtttttgtccttcctgtcttccttttagtaaaagtgattttctctggtggcgtgttttaattttttgctttttattttttgagaacctgttgtatattttttgatttgcgattaccaggaggcttgtaaataatatattgtaactcattattttaaactgataacaacttaacactgattgcataaacaaactaacaagcaaagggaaaaccaataaaaactctacattttaactttgtcccccgctttaaaactttctgttgtctttatatcttattgtattgtctgtatttcaaaaaatagttgtagttattatttttgatcagtttatcttttattctttctatttaagatatgagttgtttacatactataataacagtgttataatattctgtgtttttctgtgtatttactaatgctagtgagctttgttcctccagatgatttcttattgctcattaatatgcttttctttcagattgaagagaattctttagcatttcttacaggataggtctggtgttgatgacatccctcagcttttgtttgtttgggaaagtcttgatttctccatgtttggagaatatttttacaggatatactagcctgagataaaagtttttttccctttagcactgtgaatatgtctcctgccctataaggtttccactgagaagtctgctgccagatatattggaactccagtgtatgttttttctttattttttcttgccgcttttcagattctttcttatctttgacctttgtgagtttgagtattgaatgccttgagctagtcttctttgggttatatctgcttggtgttctataaccttattatacttgaatattgttatatttctctaggtttaggaaggtctctgttattttccctttgaataaattttctacccccatctctctttctaacttttttttaaggtcaataactcttagatttgcccttttgagactattttctaagtcttctaggaatgcctctttcttttttattattttttcttttgtcttctctttgtattttcaagtaggctgtcttcaagctcacagttctttcttctgcttgattgttttgtgctgttaagagactctgagacatttttcagtatgtcagttgcgtgttttaactccagaatttccgcttgattcttttaaattattttaatctctttgttgaatttatctgataggattctgaattccttctgtgtgttatcttgaattccattgagtttcctctgtctaaaaggtcacatatctctgtctctccaggactggtcactgatgccttatttagtttgtttggtgatgtcatgttttcctggataggctttatgcttgtggatgttcgttgttgtctgggcattgaagagttgggtatttattgtagccttgcagtctgggcttgtttgtacctgtccttcttggtgaggctttccagatgcttgaagaaacttgggtgttgtggtctgagttttgggtcactgcaggaatatctgcattagggagcactccaagcccagtaacactgtggctcttgcagaggtaccaccttagtagtcttggataatatccagagtcattctctggattaccaggcagagactcttttttctcttctcttactttctcccaaacaaacagattcagtctcagtctgtctgtctgtctgtctgtctctctctctctctctctgtgtgtgtctctgtttcctggatctgggggaggggtaacacaaatacccctgtggccaccaccactgggactgcatagggtcagacctgaagccagcatagcactgggtcttgcccaaagcctgcagtaaccactgcttggctcctgcctatgtttgctcaaggcactagggctctataatcagcaggtggtaaagccagccaggcttgtatccttcccttcaagacaactagttcctcctagtcctgggcaggtctagagatgacgtccaggagccagggcctggagtcagaaatcttaggaatctaccggtactctattctacggtgggtgagctggcacccaagtcacaagacaaagtccttcccactcttccttctcctttccacaagcagaggagtctctccctgtggccaccactgccccaggcctgcgacaagtactgtctggctactgctgatgttcattcaaggcccaggggctcttcaatcagcttgtggtgaatgctgccaggcctaggaatctattttggggcagtgggcccacctgtaagccagggaaggtccagaaataccatctaaagccaagccctggaatcaggaacccctagaacccctttggtgctttaccctgctgtggctaagctggtacctaagctgatttttggttcttatgaaggtgcatgaaggtgcttttttgtgtggagagttgttcaatttgttgttcctttgggaggctgctatttagccatatggctccacctccctctccatccaaaaagaaaactttaaatgaaaatatacatccaaagaaagtgtttttgaaataaaaaataaatggtcttaattccaaggaaagaaccaacatagtaaagtaaaaatgcattttttccaaaagttacttgtttgatcacatattgtattttattttaatgaaatatctagaataggtaagtccatagagaatacaaaacaggttagtagttgccagggaatgtgagtgtgcagaatgaggagtcattgcttaatggcactgttttcaagagttacttttgagtacacttgcagtctggtatctaaataattgaaatatttgaaagtcgtgattcctagaataaaaacagtgactaacttttaatgatttcaatgtcatgtgcacaaaaaaaccatgtccagagtaataagtttacccattctaccattcttttcaaagaattgcttaaataagttttaaaaaatttcctattgagatgttacttaaaatacgatttgtttagttctcaaggttatgctttccccaggttatgcttcatttgggtaatctaagtttaagtcctaatgtaagacctagggcatggtacttaacttcctgtagacctcagttttcttgactgtgtggtggaagaaataatagtacctagcttgtgagtttgttttaaatgttaaatgagagaacatgtggaacatcttacccagtgcctggcacatggtgagcaatcaataaatgggagttcatcctgtcatcttcagatttctcttctggagccagccaggcttgagttctgacctggttcatccactgaacttgtaggggaagcacttagtgcccttcggtcctctcatccagtacatggatatacagtcttcatgtggttgatacaaatacgaatgtgctaatgcatctttaccaaaaagagaggtaaaagaaaggaaggataatcctgccagagatacatatgcaaagatctgaaagtaatcgagagtgaggggttgcagattggacaacacttagtagtggctccagataaggttcttaaagactggccaggatgcagccttttcatccagagaaacagccatctcattcatagacagtggtgactgattggcagattttataagatgacacaaacaccctccccattgtcctgccaaaatgtggggaaactcttcctggaaaagttatttctttgaattgagcttccaaaaggttcctattagaattcaaatactctgtctgggttgaatatcacattgcataatagtttctccagattaaggccatttttcctaaatatttaacaaaaaatttttcgcttcttatcaatgatgctggcgttggttcagtgcctgcataagacttcttccagtgtatttctttaccctggcaaccagttcctttttctttgggagaattttttttttaattataacactattgtaggaactcctttttggcacagaaggcatctaaagtaacttttagagatagaggcttatgaaaaacaagaaagaggcaagactcagtttttgaaatctaattccagccatgaagcaaatgccacaaaagggcacaggaagaaaatctgtaaagggcttatctaccaccgttgaccaaagatttattctgctgttaagcaaataccttgtaagccagatattgtgctaggtattctgaatacaaagatgcagaagcctcattccctgttttctttttttttttttttattatactttaagttttagggtacatgtgcacattgtgcaggttagttacatatgtatacatgtgccatgctggtgcactgcacccactaacgcgtcatctagcattaggtatatctcccaatgctatccctcccccctccccccaccccaccacagtccccagagtgtgatattccccttcctgtgtccatgtgatctcattgttcaattcccacctatgagtgagaatatgcggtgtttggttttttgttcttgcgatagtttactgagaatgatggtttccaatttcatccatgtccctacaaaggacatgaactcatcattttttatggctgcatagtattccatggtgtatatgtgccacattttcttaatccagtctatcattgttggacatttgggttggttccaagtctttgctattgtgaataatgccgcaataaacatacatgtgcatgtgtctttatagcagcatgatttatagtcatttgggtatatacccagtaatgggatggctgggtcaaatggtatttctagttctagatccctgaggaatcgccacactgacttccacaatggttgaactagtttacagtcccaccaacagtgtaaaagtgttcctatttctccacatcctctccagcacctgttgtttcctgactttttaatgattgccattctaactggtgtgagatgatatctcatagtggttttgatttgcatttctctgatgaacagacacttctcaaaagaagacatttatgcagccaaaaaacacatgaaaaaatgctcatcatcattccctgttttcaaagaaactcacagcattatggaggcccaggtttctatttgggcctccataatgccttgtgctctaccaagaatggtaaaacaatcctttccagtaggagttcctagttagtggcttatagttaaccaaatgaagagaggatgaccatatggtgctgataaattgaaagaaattaggatgaacatctagagatttgcatggccagacacctaattcagattgcagagcagcaggatgggaggcgtagtcctgatttaactcttgatcaaaaagaggggtaaaagaaaagaaagataatcctgccagaaatgcgtgtgcaaagatctgaaagtgatcaagagcaagggattgcagattggacagcatgttttctcatttaatcccagaggaaccctgggaggattctaggtgtgcatattgtccttattttgtagaagaaggtactgaatcttaaagagataatgtgttttcaaagcttacagagtccaaatcgatagctaaacagtgtctgtgggatttgaatccccctgtgatgttcactgtgtgttgccatatactgcaaatgtgttataaaataataattataataaacaaaattaacctgagatattcccagattgaatcaatccaaggagactgaacttctgagtttgtcttggagttagttgggctttactgctacttatgctagatcttgaaggcagagtaggaaatatacttagcagggaagtgggagaaaggtgagaggttccccaggcaggggaaacaaagtgagcagatttggggcaaggtgtgtgagattgtgtggttggcaatatagggtgggaaaaattagttatcaagggcaaagctgaatagcagattgaacccaaatggtagaagtttttatttaacacacaaaaaaggctgaaattgatcctgtaaggaatatgaagctatagaaggtttttcatcacaggctttgacattttaaggtttgtatctttgaaagataatccaaagataagagaaaaaaaccttagatgtgtaaaatagaagtcaggaaaactacacaagctatgtgtaaagggagtcaaggggacaggatccaaaggaagacaaaagcacaaaccaattattttaaatcaaatactagtgcagtaacatatatttttaagttttaaagctgcttttctccatagcttattgattactcttttaaaacttatttttaatagcagatattatttattgattccttaccattttctagatactttgctaaggttttacatgtcttttttagtcctcagaaaattctcttctatctccattttatagctgaggaaactgaagccagggaaggttaaataatttgtttgcaatcaaacaactagtgattggtggaatttggatttgcaaccaggcagtctgactccaaaggcctcttcttaacttgatcctacatacccttcctaaatagtaggcgtttttctcagagcagctgttttacattagagaaaacttatttgtaatctgtgatcaaggagaaactgcctgagttgcctggattattttggcatttttaatatgtacaagaaaaatgttatcaaataaatgtaaatttaaaggtcctgatgagagtttactttctaataaaacaattttcaacatttcccattacatcagaaactaaattattattaaaacacatcttgtgttcatttatttttgacaggctgcttttcacatctttttttttttttttttttttttttgagctggagtttcactcttgtcgcccaggttggagtccaatgacacgatctcggctcactgcaacctcctcctcccaagttgaagcaattctcctgcctcagcctcccaagtagctgggattacaggtgctcgccaccacacccagctaagttttgtatttttttagtagagacggggtttcaccatgtttgccaggctggtctcaaactcctgacctcaggtgatccacccgtctcggcctcccaaagtgctgggattataggcatgagccaccgcgcgcagcctccaatcttattttaatgaaaatctcaatttatctcagtgttagaaactagggcttcatttggcaatgtggtctttccagttgtttcatctctttcaaaagtcttttaagaattattgaagtaagttaattttaaatttttgctttatcccttgagattggtatatagagttaggaactacttgattaaatacaggaagctactataaatttgaaataagaactaaagttataatgtgaccagactgggtaagcactgataacatttgtatatatttaaacagaaaaaaaatagttagaagaataatttttaaaaacacacaccagatgttggtaaaggcaaagatatttttgctcttgactttgtctatgaaagtcaagtgaatactttgaaagaattgatgatggataaggcaagtacattgatttctcaaggtgtgaattgttatcttcaaactttgtgcttccataattgttttttctttaataatgagacatctagaccataactggctatgtgattctgaatctacctttacaacttaatctttgtgattcccctatataagatatctagagtagtcaaattcatacggacagaaagccaaatggtgcttgtcaggggctgggagaagaggagaataggaagttactattaatgagtacagggttgtcgatttggaaggatgaaaaagttctggagatggatggagataatcgttgtgcaacagggggaatatacattacaccactgatcagtatacttagaaagggttaaaatgtcaattttacgtgatgtgtattttaccataataaaaaatacttaatatttacctatgcttagagagagttgacatatagtcatttgataaataaaatttgtaaatgcgtatgcttagataaacatagaaaattgttttaaagtagaacttatagatttctagctttaaaactgtggagaaacaatcttcctatgccatttttttctttaaaaagtcactcaaaccaataattagtacaaaaaacagaaaggtacatttcatctttgaggaaactgggagatgtctgtgactctaagccacaatacataaagatagaagtaggaagagaaaaggtcaatgacttaaccaaatcagagaacaatactaaagtgaagcaaactgagctgccccagtcgcccaaaacatactttggaagatggaagagttctaaatatagcaggtgtatgaacatgtatattatatacacttctccataagccctcactctttttcagtgtagtcaacatattttgcatccctctccatggaagacagagactttgggatactaagcaaagagtaggagaaggatggctgtatgtttaactttatttaggacaattaaatgaatgtctgcaatgtgtcagtaagaccttcagcgtccttctcctacccacaccagaatgctaggaagcatatttatatccttctctagaaaaatagagataccccagaggaaaaaatctcttacaaatagtaacatttggaagaggcaaaaaaaatccccactgggcacttgatgatactgcagtaaaactcccagtacacaagcctcacccatgcacttagaacttactgtcacctttctagggtctcattcttgtgtatgaattgggatcaggaatcaatgctggagtttgaggatattacactcattgctctttgtttacattatttacatgtatttctttaataaaatttaaatatttaattcaaaataatgttaaatttgcagagattcatttaagtttagaataaagaagaacaagaaatgtgaaagagggacaagaggagaggcagaatgcaaaggaaatacagcagcacttagaaaattttaaattagatagtttttcttctgaaatccagtattgaattagtgcaaaattctgaaagtcaattacaaaattcattttatgtcaacattactgactccatgcacaaatgtttattctagttttaaaaactagtattctgtaccttttaatagccaatgtaatttgttgacaaatattgaaatttatacgttaccagaggtctcacgtattgttaccttttaaaatgatcatttattaaccagtattgcctaatgaggcaatcaaaatgtcatctgttgcataggtaacaggaaactaccattactcatgttgtgagatggtcaaagaccttatcatattttatggctaacaaactcatgatgttgtcatatatgccctcatcacagtgtttatgatacctaaaagttagtgcctaaaaattagaaacaaggacagtgaagttagattgtttaatcctgcatatcttaaagatctaacattttctagctgttaaatatgtttatcattatactagtaatgtacgtgcaccatttttattatattaattcattgccactgtacaactaaagaggatggatgaattttaaaaacttccaaaaacttggtagcattttttaatctctttctcttcctcttttctttctgtcttccacacacacacacacacacaaacacacacatacacatacatacatgcacacatacacatcatgaagagcaagctttggaatgaaatatacctgggtccaaaaattttgaacaaattgttgactttctttatgtatgaaattattattatcacatctactttggagggatgttgtgatgtataattaagaaagtatagtctacttagcatgtaggtaattaataattagtagttattattattatcctaacctgacagtttatgaaagaggtaggaaatctgaagataggaaagccttcaaaatataatactccggacttctcctttgggaattaagaaatgtagctccaagcaaggttcatgccagtaggaaagtccttgaatccaactgtattcctagtaagtgtaataaaataaaagaaacctctagaaattgcctcaaaattcccctccagataaggaaaataacacaatatttctcaataatgaggaactgctacaggagttcagtgtcttattctcattaacgttagagtacaatagagaatagcaggaaactgtaaaaactgcagtcccctggtctttttttctaaaaagttagtttgacatatctggagtactgaatttcagcatatttgagaggcctgaatatttagttgatatataatatggctctaagaaatatgctcatgatagattggaaagtatagaatatctattgtaatctgaaaataggaatttagagaacagaagatttgatagtaggcagagtatttgaaaatagtaatacttgagaaaacctgagttgtatagtaaaattactccgtaacacctcattcagttggcttcatttaatgtttaatgtttaatccatggataaatgtcataagtctcacaagtcacgctcaccattggatgataagagaaagggagatcacattttaggtgcgcacaatctacctgtatgcaattgacgctttccatgtaagtgttgccaagttgtatcggggcaccattagtggtatgagacagactttaggagttattttggactcctttttttctattaatatatcttatattttgggggcaaattataccagtatattaaatctatttacagaataaatataaagttaccttttatattcagtttaagtttttttaaaaagtgagtcaattaagaaaaatatcaaatcatggtatagatggaatgctaatatggaaagaattatgaaggtggtgttatgactgaagtttcagaaacatcaaatgacatagtcatttgattcaacaaaacatctacagatggatgacccaatggatgtatacatctatggtacagtctattgaaatgtggtaacaaccagaaagtaaaaggtccatacattatacaattcagtacaacagggaaatactgagaaataatcgcagcttctggatcaaaagcatgggccacatggttcctaaatccagtctccccatattcaggcctcctcatcagcctgcatgccatcatatgcttgcatgctaacaggaatttcgagggaaatgccatatcttttccatttggggaagcttttcagagggaaaactacaggatgcttagataacaaaacattctttcagaaatgttcatgtgagaaatggtcttacaagtggataaaactctgtaacatcaaatacatactttttttttattctgtcactaccttaaatattaggagtagaagcaaaacttaaatttaaatctcaatggtcttacaacatagcgcatctttctttctctgtaatggcaaccttgatgtaccaatccaaaaactttgagtattctggttagttccatacattgtcagattccccacttaagtttgtttttgccaggggagagggacgatttcttagtcattatggtactattatacagtctttagtagatgcccaataagtgtgttaggttttcagagaaagattcttggaagatgtagaatgttgggcaagtaagcaaggaacagcacatggggctgcactaaacttgtgtgtgtgtgacagagaagggagtagcatcaggctaaataagctcattgtaacatggatctgggggacggtagaacacaggctaattatttctggagagttgaaaactcaacagtcagacattacattctctgatcattgtcatttgctttctgaaatggcaactggaagctatttggtagaccttacatggagggaacagtgtttcaaataaatagtagttgcctaattttacttggtttgcttttgttctttcttttcccacatttaaattccaataagaaaaaaattaaacctcttcctctaaatcccctctcccctaaaaataattagtctcacaaaacttttaagtttccaaaaaaatacatgattaattaacctgctttaaaatgccagcaatatactagacatgggacagtgctaagaaagtgtgaatgtcccctggcagtcataaggaaactgaaaagcttaaggggataactatgtggaaagcaatttattggcatttaccgtaagaggcctgagagtcattgaaagaagactaagtcacaaatgcaccttgaagtgtgaccaggggagcagatgaagggtttgttgtaagaagcagccagagcctctggcggatgccgtactacattttccaagttgtttgggtgggtcacaactgcactccaacatcctgtctgcaaatgctaaataaacaccaagttcacgtcagactagagaaccaacgtactagctaatgccatttaagcaatcagaatgcttacattattttcacttggtaattcacatccaaaataattgaagttggcacacccagaggagtatatatcctctgtgtagatgttcagagagataggcaggctggtcaactgttccttctgttgggagcaattggaatcagcttagattatatctactgtaatagaaaatattttatatttaggaggtgggaaaggttttggccttcgaaataataagagatattgacaagatataaagcttcattccttactgaagagctgttaaggattagcaaacccaagtctttgtgtgtagagatgaatgaaatttgcattttttttaaaaaaaaataaggtttagaaaacattgtgcaagggaacagccttaatacgtgcagccacttgtccaggaataatacattcaatttttcagtttaaaattccagtatgttctgatccaagggtgcctgttacactctgctgaatttttaagaggtaatttacatctctacaaccaactccaaagcatgacatttcattacatccgctcaaaatgaacagctgctaagtcatcaagttctctcaactttgcttctaaagagaaaagtttagttttagtgcttcagtgaaatacttttttgaaagaatgacttttataaaattcatttgtttattatggtaaataaacaacttaatggcaaggggtgtgttccttgtaaaggtgatcacggaatgttacccagaataacacagacatctcatttcccagagaaggaaatggttttataagttttgtgaggtctcttgtctgcttggccggtttacagtgctggtctctggagctgatccgcccctttgctttgtaagtctcagcaattgacgaggctaggctgggcgctgggcttttctttttttttttttttttttttcctttctcactgccctgcggtgttttgaactgccttcttacagacgtcatacagcccttgaggaatagtttctgcctggtgagattgaatgatagttctcattcacaaaaccctggattctaagcagggacacacagaaattactttcgcaggtaaatcagcccacccagccaaagtgtggagagatttgttccttggctgacttctttgctccacggagaggagtgttttcctgtgcttgccctgaaatggaacttccttgacagctctcccgtgttacagtacctcccggtcattttctttttctctctctctacctgcgctcttcgagtgtcagaaacctttaaagctgttactatggaattgcaaaaaagagatcaagtgactctttcactatgctggtttcccttgtgacccagatgaagaatcaattcagaattcagttcctcccttggcattgcaagacacagaagaaactgtcacttcctaacagcctagtactggagtaaattcagtatgaaggaagaaagcgctcctgcgtgttagaaccttgcccatgagctggaccgaggacaggagatggactccaggaaaattggatttcttcaagcagcctcccttggaaatggaatatctttaaaatcttctttgcagaaagacagttagaatgtattaatcagaatagttgaagacttattttcctttttattttttttcaaaatgagcattattatgaagccaagatcccgatctacaagttccctaaggactgcagaggcagtttggtaacgttcttttctctcatgcttttccccttttctcttttaagattgacgtactccttgagtatttagtaagttgtgtgatgtcgaggctttgtgaaagaaggcagtattggcggctcttttattctttattttgttcccaaactcatgtgctttaaccaaatgggtgctgattttttttttaattcctcttggactgtaacaatttatctgatgataatttttaaaggaggaaagaaacttgcagatatgttgggagttttgaaaatgaaaacttgtcatttttcagtgtttgattcagttgcttgttttcttatcttctttgcttgctgcaagcaggctggtggttgacaggctttgcccttgtctttaaaagcaataccctcacttttagcacagatgtgttagaaattaataatgttatttatatttaatcatacacatgaaacaaacttgaatttaactatgtggctaaatgtatatcaagttgcttatcattcattcatctcttatgttttattttattagaaatgattcctagtaattatatttttggttattttaatgcttttactctgatgaaaaaatatgtcagtttcaatgtattctaatgttctattatttccccaatggtgatttgatatgctaatcagcatatggcatggcccttaaggagtattttccaacaaagtaacttttttttctacaataggtatttacaaaatacttttatggctattttaggggttagtcttattttgtttttcttagtgattgattataaataactaagctcacctctttgaaatggaaataatcatacctcacactggggaaataaaagcaatgattgaagtgaggtggttgagaatgggaggaaaacaggccagcaaaatatgcattatcatgtgagcaggcaaacacacatgtaaatactcaaattatttgcgtcaggaatttagcttgtgtttttgtggataggttagcctttgctgttattgtagtgttttacagtcaaccagaaacaagaattgccccatccgcagtatttctgtgagttttaataaattatagatgaagattttgtctcttaacgttacttgccatttcttacaaaataacacgtgcaataaattattccttgagtttatttaaagaaaagattgcatctgcaaacaaatttggagagtcctgtcctttttttcctcaaacaataaatactggaaaatccttaaaatccttgtatgaattaccatagctaatataaatcaccaacatgagtaaacagaatttataatatacatgaatttaactcatttataatttataccattcctatgtgaaaagatgttactactttaaaaatagtgtttaaccaaactatttctctttttgtctaaactgccaggagatgtattttcaaattcaggtttcaattggaaataatttgttcatttcaggagatgagtaacattgacaccctttacctctctgagattatcatagtctatttttatccacaattattatattttttgttttaaattgtatgggatattttcataagtcaagccacaatttaaaatgcatttttaaatattttgatttgttaatgtgtgtatttttccatttaactaaaaatattctccatagacttggggatagaatgatttctgtgtaagaaataaatctctctctatatatgcatgattcttagatttaactacacactatagaaacctctccagttattaatcttacatctgacttaataatataaccgcttgggtatatcactgcagctgccaaaaaatttggcctgagggtataatcagctgtagtaacagttttgccattttattatccgtctatcagtcaaatattagacacatctattatatttatttatttaattacatgtataaaatcaatatagattatagatttggtatatagagaaaatatatgtttgtgtgtatatatatgtatacacatacatacacacacacatgtttacttgagcattaaaaaaacccaaacggcctctcttcttgtgcctctgcacataaaggccacaggcctcaaattgctcagagggacaatgttttctcaccagtgttgctgtctgcatttctccaccaccaccctaccctcattccttttcagttgacttcccatgagagagacctaaaactttgccatttatctctttttcagatgtttatttgtttccaggttgatctccaaaatactttgttcttgggacacatctttctggctttaccatcttcactctgattacataaatctattttgtgttccattggtctactttctccaaatctgtctactgtcctccgggattccctaaagccaaacattacgtttggaagtttgttgtattgtgcaagaatccaatgttttggattacttctttacctttttctatttgtttctctccaagtatcataaaaagcagtccacactaacttgtccttacagccttaattaaattgctatgagatattcacattttaaatgggatttcatggcaaacttgtattttatacccttcctcttattaaaggtcagcctgttataattaaaattttattaatttcaagacaaaatacaaataaccttaaaattaatctatttgtctctttgtaacataggtgtccaaatttagggtttatttaataaaggtgtatactaggttgcttttatttaaggaacagttatttatatgccacgttctagcagaaagtgattatagtatttattcttaagcattattttaaaaaaatgtgcctgcatgaaattgagaaaaactttatatattttcttatgctcataaagctaataaaattagcagattcattgattgcagaattgtttgcctttcttgcatatcttaaattcagatttagtcagttgttatatactatgaaaatattaccttacatattccttgatatctctttaacacttttataaacatttataaacatttcccagggatacttctcattaatgtaattaagacttgtgatttagtttaagtaagtaaaacattattagtcttacaaatataaatataaagagaagtttagtcaatggaagtggacttttttctttcctgctgacagaacagtgtttaggatttatgtgttacatgtaagatcattcattatgtaatctgaaaataaaagagatgctactgttcaaaatatgactgtggttgtttttaaagcaaattttaaaattggttattgtatatgtaatagtacttatacttttcattataagtattattatgtaataagtatacatgtaatacttaggtttgtagatgcagaaaaaattctggaagactctgtccaagcttttggtagtggttattttttaggagtaaaaaaaaaaatggtaggagtgaaggtaagggggactgcctctcttttcttcactgtatttgcatattgtatgtagtttttatcaataaagtattatatatgaaagtttaaaatattaaaaatatacctactatatgtattagcaagctcatctttatatatgccaatatctacttagacattaaaccacaatttgctcaggttatataatatgcaaatgagtatttcagtactggttggatacaattttctgaattttcttgcaactctgaccaatggaggattataatttttttattagctcttttctcttaaggttgtaaaaatctagactggcttagcattcttattttggcctcatgatcacagtggaaagcattcatataagctaaaatgtccaattttataattgagaatcaaaaagatggaataacattaatatgttggaaggaaaataacccattaaccccattattccatcctcagttattctcattttcaacttaccttacatatcttaaatagctgtaaatactatttctgtactctgcttcttcatttaacatatcaatatttttctatttttggccaggcggcgtagcttgctcctgtaatacctgcaatttaggaggctgaggcaggcagatcgcctgaggccaggagttcaagaccagcctggccaaaatggcgcaaccctgtctctactaaaaatccaaaaattagccagagtggtggaacatgcctgtaatctcagcttcttgggaggctgaggcatgagaattgcttcaacccaggaggtggaggttacagtgagccaagatcgtgccactgcactccagcctgggtgacagagcaagactctgtctcaatttaaaaaaaaaaaaaatccatttttctaatacttatagctttcattttattgagtgtcttatgaaagagctctatcaagaattttacatatatattatttagttcttattacaatattgaaaagaaggagttgttaatcctaattttacaggtgagaaaatgattccgtgagatgaaataacttgagcaaggtcataggctggggtaacccaagtctgtctacctcaaagaacgtgctctggttcttcagcttgttgccttcctctactgtggatataattatctttttaatggccataaaagtgttcatgttgtgaatatttctagatgcattacagtatttggcagttttcttttcggaagtatggtagcctatgaaattcagggttgacgttgttggttgttgaaaaatagctttgtgaaagactgttggttgttgaaaaatagctttgtgaaaggctcttgcagcttgtagaccattatattctctactggtagcaaataaggtcctctggtctttataacagacaataaagaacaaaaggccaatgcctcacaattttgaatagattatctttccaattctattaccaagtttttctgttctctgcaagctctgtaaggcttcaggttggaaacaagtagtacatatcagattttgtatgacatctaagatcagctttgaaaaaaatatgcaatcttccttcctatttcttctatcttagaaacttgtaaatacgcaaacaaatggaattctcatattttctgcctgtgcaatatatattatgatttggtttaggtatgtgactactgtcaaagttggttcagggttttgagcatgaggtaaactttttttggtcctattacccaagttagtgatgtatctgttatgaaatatacttaaagatatacagcttttagaaatgattaagataccttgaaatatttgatgtatttaaaacataactagaaagacacagagtggatcacagataggtttactctttaaagtcatgaagtatgagattccctggaaaaagccatttgtccactgtacttctaacatgctctgtgtccctggaggagtcacctagtccctctgaagccaagtctactgtcctgtaaaataaaaggggcaaggcaggtcaatggattttaaacacgtttatttcaatgggacattttttattaatgaaatgtgagttgaagttaatataaatgaatatttatactgtaatttttagatataaaatcatatataaattcaatatatagatataatttttaaaaacatagatatgtgtgaaatatataagtaaaaagtataagcacacataaaacaataaaacagccactgagtttgtacatttaccccccaccccaaattcaaaccctctccttaaaatacctctaaagactttaggattccaaggaatattgtttgaaaaccactaagctaatgactgttaagatcacttacagttttactctctgcagtgctgccttaccgcgggagagtcatttgtgtattctgtatctctatatggattgggataaactcgtaggtaatgtagcagttcaaatacctctgccttataagaccttgaagttatgtaacttttcccacttctgagatatcacagaagagttatcactataatagttaagatctattcattttatttagcatcttattttttacaagtttattttaggctcatctggaatgagaaaatcatgcactaaacactgtatgatgcatagctgataattcaggaagtgagtatggttgttggtaaagaaatgctgaattggtatgaaattcttcagaagcaagacgcttcttttggtatttcaaaatggggttctccaccctctttttctatcatgtcaactggctgtggttatgtgtgcaataatacttagtcctgactgcaactcttttttttttcttccccacggatctgaggcacaccatggttttggccttatcattaaaacttgccttttaggagaggtaaaggaatagctcacttagtagttcctctgtcaatcattccaatcatgtagtgaattctattgaatcagaagggatgatgacatgaaggtaaccatgagtatacgaatggttagtcatggatccacccaaccattactagcaagattgagaaaagtagattctaagatgaaactgaaggggaagaatattaatgaggcctttaaggagtttttaagctttttagggaaagatgctgagcgatatgtataaatattcccaataatactaatactaaacatatagaattgtcaaagtttagataaaggtatagagaatagggcctgagggatattagctaggttggtaaggaagatagtcacaaagaaagcacagtcttaataaaaaatcaatatagattttcttggaagcctttccagaggtgatccaatatctcaaaatataatacaggggttgaaggtatattagaaaatggacagaagtaaggtatacttcagccacaagcaccaaatctctccagggattggtgcctatgggaagggctggggtaccacatggggcacaatgacagcaagcctgggtgagacactgttaaatataactgtgtacaggtaactaactaatgagagcccgtgccagtgatatgtctcagctctcaaattgcctagttctttgtcaagtttgacctaaattagaaagcatttcaaaagtatggaaagtaggaagaatgccagaacctatggatgcagttttttagcatgacaggggcaatattgtaagtatttattatctgtcctaagccttctaaggggattggctccctaatgagcatcctgggtgatggctgaggatgcgaattagagaagctaacagaagggtgaactgctcttcagaataagagttagaaaaacacaagggaatatttcaagagaagagctggggaagtgtggcaagaaaaaagagattatacagagaccaatatggaagaattccagcccagtttgaactaagcatccaccatctagcaccctaccctgtttaataacactggcaacctctgggcaaaagctgccattaatgaaactcagtgtagaggacatttgccccccatctcagccctaagaatttctgccatagggtaaagggggtcacctgcaagcccttccatttccctactacacatgaggaagaataagaaattagaaaactagaaactaggtgtagaatgtatgcacaccaaggattgcatcttccaaagtacccttataggaagcagtcctgttgttttaaacccacagagttaggaagttttctttatatctaatacaaatcttctttgcttaaattctaacccatttcctcttagttgtcagtagatataatgagagtgaatcaatagataaaccaattcttctttatggcctttgaaaactgctagtgagtgacttcttggtcttttttcatttcatattgcaaaatattcattctaaattgtaaaatagatggcaccagtgtgacttgttaaaataaatgtttcattaaacataatttcagtatgtaattgttttcagacttcctagagaaaagtgctcccgttgtatctaattctctttcttgtttaaaatacatcaaagatgagaaattgagctctttttagtgaacttgcttgagacattcatatggaatacagaaaataataattcctaacattcaggatgtcattccattgcaatgtggcacagagttttttctttgcatcaaggaatttatatgactgatactattttagtcaggataaattactgtaaaatgtgtccacttttaaccaatggcattctaacatgggataggcaacagcgggctgtgatttttgctctgatactgcaactttgttatagaatagcaagtaactgattggcagctagatcaccagctagctggagaaagcagcttctaggtctatagtcatagttggagtcataacctcattaatgatagctacaatgtattgggcatctactctttgacagacaatgaacttagtactatatacagttgaagcaactgtatgaataaactgtatgaataaaacttgaagtcgcacagcttataaaattacagtgctgcagaaaaatcttggtctgtcgaaactacatcccatatttgttgttgttgttcttattgttttgtttgcttttcctcactatctaaactgctttggctacacatagttctgtttcatggtattagaaaagtagtcaacaagctgctacttatacttttccttcctgtcctagactgttcaagtttcttcttttaatcttatgtatatcaagaacatgtttgcctatggtatttgtctgcctttccccccaagatttgtatacaagcctccaaccgtgagccctagagatatattgagaaatagaacatggactttgacacggctccattccttggagatctagctagttcctgactcgttcagcttattgactctcttcctctggtcagactataaattgcagttttccttctctctggcatttgaccagttagtagcaccataaaacctttgaaataaaagagaccacagagaataacctataatctgattttccccacccctaaccccaatgtggagctggaaacattttgctagtctttaacatttccagtcaagtagggtcaagaaaaactgttaaaaacaatgtcaatgcttaagtggtaaaaagatttgttgaagaatatatatatatatatatatttagagacagggtctcactgtgtttcccaggctgaggtacagtggctatttacaggtgtgatcatatgcactacagccttgaactcctagtctcaatcctcctgccttagccttcccagtaactgggactacaggcatacaccaccatgcctggctggagaaatatttttttaacttcaaaaatgaagtttgagctgaaaaagagagctaaaaattagtctgtcaggcaaatgtgtgaaagcagttctattataatttgtattgagctataatgtaattcctaaacttatgtcatatagctaagtaagtagctgtaattcgcatcttgaaattttaaatttacttctttcctctcaatatagtcttcatctgaattaaaaattgtggcaatttgtatttattgtgtacttaactatgtgccaggcactgtgctgttcacttgacctaattatctcattagatcctcatgatgaatcctagacagtactcattagtcttattcctcagactgaggcctaatgaagtaaagtggcttgcctaaatttgagtggcaaataagataatttcatgattcgcatattttcttaattataaaatgttacctttagcaatgatgtatatgttaatatgttcaatgagttgatctacctgaagtgcttagcacatggctggctccttgtgagtgaccaggaactgttagcttatattatgcatttttgaagtttacacattggtatgactttctaaataatcaagaactctaaatgtgaaagctgattcattttgtaagggtttcttttccataaggtagtcttttttaacacagtcagaattaagcatttatatagagctaggtattccagataaatcacgttaatagtgtgattcaaagaagacacactgctatctaggtgggtcaaagaagtaaactacttagtggaggtggcaaaataagaagtggtcagtgggaagctaaaccacctctgatttagttatttaaaactcaatgagaaccctctaaggaagcacaactaggcaggggtttcatctgaaaggaatggtcagctacctgagcattatctctaggtgcacctttgtaaagactttctccatgtatctttcctactgggtgccaccctgtggcttggtcctacggtaatcacactgccaggcattctctacctctacaaatcccttactcttctagtcctaaggtgcattcctggttgtgtaattcacagattattatctccctggagctgagcctcatcatctctatcagaccagactgagaaggactcctttttcctttgtcccgccatcccagctcagtgcagaaggcttaagatgctttctccatcatttctaaagaacaacagacaaaaatagagatctggttaggtctgttcttgtggcgtgaagtgttaggatgagctgaacagccacaggggctagaaatgtcaagaatgcaatacgttagagcaggcatttagcattcctgtctctgatatctactattttattatgagtagttaccaaaacaaaacaaaacaaactgtaaaagcattattttgttataattaacaactgcacattggattaagtgtgattgagggtggagttcaccagcttgggaaaaaaaattaaccattaaagattccctgagtgttttgctttaaaaagagatagcccaattacttttctgtgtttcgttaagagtctactagtatatgaatcagtaagagcttctagggtaatataaaacacacacaaaaaagcaaatttgatgttagcagacaactttttaaaggtattcgtgtaactgaaaaaatcattttacgtacataggaatgaaattttatgtttacctagaaatatatgtgaaatccctccattattgcaagatctttttcatgtaaatatcaaaagaattagacagtctgcattgtttaaaaccaagatagctagtctttttaatctatgggcaacttgtaattacgaatagcagtagctgcctggaataatgtactgagagctgcgttggtctcagagaaaatgtgctgtgatccattggtgatctctgccagacagaagagggacatagtgtggctgcttgccatttaaatggccttgatgatctcatcataactctatatatctaatctcaccattaaatttgcatgcaaataaagtcattgtagcagaaacaggttttatgcatacatacaaatacatgtgtattttttgatatgttttgtctatttgtcacctatgaagaacatataaatattgtaaacagaaaaactctttttggatgttgcaaatgcaaagaagaaaaataagtaattctaattttcaaaggtcacccctgtaatcaccacccagattaaaaatagtaccagcagccaaaagtcacctttatgcccctttaagcccctgcccccacctactaaaaataatagtgatcctgattttgaaaatcacaaactttttaaatttcctgcttttgaattttatataaaaggaataatatagcatgtactcttttgtgtttggctgtttccctcacccccttgcaaaattatgtttgaaagatgatcccttgttgatgcggatatggttcattcattctcacttaagtataggtaattaagcaaacttttgtttgagatacaaattcagggtaaaaatcagattttctatttaaataataatttggtatatatgactatttgagcattttaaactgttgtcattttacaataattattttagtatgatttaatatccaaattctgttgcttagattcaccctcagtggacatttcttctgaagggccttcctagacttccccaattagaattaaaactctcttctctgtgctgtcatgaaaccttgtacatttctctaactcttgaaggattacaattattgtcttctgtctcacgtacctctcctgtgagcatgttttggagtagactgggtttgctcatctttgtagagcaatgaacccctgttcccagcaccatgcctgctccatcatgggcattcaacatctgtcctttgcatggaaagtagaacagtgagttcttccatattacaaagaatattacagtcaatttttatttttaattttcttttagtagatggcacttttcaggagattgtactgggtgagttgtagacacagtagttactctttatggcaagagttgtatagtatccgggaggatttttgcctcttccctgtggctttctttcacccttagtttgccaccaccactggcaattctaatctaggcacaccttccattgcctcctgtgtttcccattctaaaatatatacttccaagttttcctctatattttctgactgctcgaatgactcttctcgtgtcataaactagtaaagagtagtgcatatagaaatgctgataaatgtgttgcacatggttatcacccgactgacatgctgaccttctgactctatcaatgggtgatttttatatgaagccaagaaatctgttggtggtaagtactaagaccaccacttcaggctcactctaacctcattgtgtgcatcttgaaaccccacacagttgtcacatatgagcagattccacaggagggatgctgaaccaaagtgacaagcttgtcctggagccctaacacagggattgacccccgaccttcaaagtcagggaacaacttagggttggcttaccttcttgtattgtgaacttttccgattgtgaagccagcttttagctttaccacactcccagacttaaatatttggaatggcaagaaattaggcttaaaaaaaaagaaggaaattaaggcttaatccttaataatgaggaagtaatttgttttagtattgtacagaaacattttctagctacctgatcatttagtctagttctatagcttaaaatatatagtccttaaagaaaagttttatttctgtgggtctattagttacaaaagtaaaggtgcattttttattgctttatttaagtgtttattaagcttgttctgccacaggtaccctgctggctgttagagagacaatggtgaaatatacagcactcggcttcataaaatttatggtctagtgactttctgaagtatttctatagggcaggagacttctatttcaccttctactatatccttggaatagtttttactttcctggtaggagtgtgcatttatataagtgtttcagttgcttccagaaatccagtggtaaacaacataattttaaaacctccctacttgaatttggggtggagtaatataaaataaatctggaatatttgattttttagaccaaaatactttccctgggttagagagatattttcttttcttactggcctggaaatccatgccattttaataagagatatttttattctaggtaaattgtttacttaatcacctcctaacaaggctgtgtcagccaagttaaatatttaaatttatttttatttaaataaattttaaaaccaacagatttctttctcattttaatgaatttagcctttgagttttcaaagataaaatatacagagtagaacattttaatgtatctgtagagagggaacacaaaaagggcacatcaggaaaaaatagttggaaaaaagtgaattttatacaaaattaactcataaaatgaatataaggcattatttcacttattgccaaaatctgtctttacagataatcttcgggagacctttatttttataggccctagttaaaatattttttgaatgcttgaggctctatttcactaataagagaaataaactttttctttctataaataactgctactagcttgtttgtcagctctctaaataaactcattttactattactatgcttgagtgctgttatatattcctttgttactgtgcataatccctggctataactgcattaataagtaaggccattacatcaaatagggatctaacaaaaactttcgaatggactatcaaagaccagattcaatgcaggaaatcagaaggaaatggcatttatgtcctagtgtagttcagttaaaaggcctgcccttaaggattacaactgccataaaagggcaccatgcaagaatggaaaacctgtttacaacaaaatatcaaattattatctgactttcacaatgaaccacattattctatgactgccagtcatacatctggactactataccatttgtgtgcagttacagcagctccagttctatatggctagttttgaacttagtctgactttaaaacccatcccatttactatcctctgctttttttttttttttggtgtatattgtgggaaattccataaatgatttttataaactttagccagtaatcgggaaaaactgtaagattttgtttgtaagctttataaacgttacttataagattttaattgaattctaaattaatttctaatttgaacctctcccttctcttagctttatatgcttggtcatccctccttaagtaattagcttttttgaagctttgttttttttggtttttcactgtttctgttatattgacgatttgactttcttataaattgttagtaatttcctgaataaagtacagaagtttatctttcaaatttcccatggatcatttcttaatagtcaaacaattgtctaaatttccaatacacaaagaaaagttttagctaacttacttcaataagatggataatttgttcaaagtgccaaacacatttgctttcgtaattcatgccatttgtgtgttaagtgtataaaagagatagagaaagaatataggaaatgtaactacacatgcaatcttgggctttccaaaatgtttaaagtaccaaattcccttggtgccaattgctttaggcatttcatcttcactcagttgcatcctaaatatagcgtaggtgtgacataccctgtaaatttcaaattcacataaagaagtcccagccttcgaggcaagtcttaattgaatactaaataaaaaccttagtgtcttctgaaatgtttctgaataaatagttgctttacagtctttgatttctatgttcgttagtgtccaaattcagaatgggaaccaacttggggagaaaaagaaaaaaagactctcaggacaatctttttaaaggagtaacagataatctattttggctaagacagggtagattcaggtagtcagataatagaaaggggagtcccttgtgtatcaactgatgctggaatttgtgaaatcctataaagttttgtagaaaaaaatgttaaattcatggaaacttgtttggtcataatcctcacagtttctaatttagtataacatcctgaataaattcattcagaccgacggagagaagaaattattatttgcaatatgtgaatttctgactaataggagtaatagaaaataattggtcccttaggatatttctgattatatatgagaggcttggggagggactctgtgtaaccgttgcttttaacccttgtttttgatgggtaaatagaacattaatgctacatgaaagatacttactctggcatcctcaagagaaagtaggttcttttttttctcagttatccaagaaacttttaacaattctaaagaaagaaataaaaagcacttagttttcagaagcatgtttcagcttcttgcatcaggagtaggccagatggccatgttctgtatggctttataaatattcctttttgttccatgtaaaagttaatggctagttttaaaccttggtatcatttcgaagtcagaccttatgtgcttaacttcattcaaagtatttctattttgttaggctgtaggaaaacatagagctgagctattaaaattccagggcagtttggaattgccaacaatatgtactggagagatgggggtggattctgaagtcaaatgaatttggaactcatcttcttttacatgctgggtgattttggacaagggggaaaagctacccatagggtttctgtgaatgttaagtgaaataatacatggaaagtgcttgaagtaatggtagggacacagcaaaccaaaaaaaatgctagccagtttattattagaagggaaaaactcctattaatattttcttgtttatgtttgtgttttcatgttagtcttaaaacaagttactgtttgagaatgtgagaattttaaccatttacaaaatggtgtatgatatgacatgtatatgatctctcacaagtgaaatgataatggaaagtttactgaaaatgtcttaacagttctaggtaaaacttaatttttccttaatttgaaaattaataaaagtatgaattagatttaatctaaatttattattctgttaaagtcacatgaatgtggaaaaaaatcagtatcacttctaactaaatctggccttgaaacttctttgacatagtcttcttaaaatatatatatcttatattctaaattgtatattatttagaaatatgctatttctaaactgaaatgtctgatatttctaactgatatatatatctatatatgatatgatatatgattatatatatgttatctatatgatatataatatatgatatatatttctaactgatataacaatgtatctcagttcttagagatatgtaaattatattttaatagtagcctacaaagatgatacaagaagataagaaataaatatacttttatatataaaatagttcaacagcaagattcttatttagaataattttctacagttttatttagggtagtttctatacagaaaaaatacatattttatctcctttctgtgctaggctctggagatgcaatggtgcctccctcccttcctggagcttaccaagcaaaacaaattcactaaataaaattattcctaattgtgttttaagtccagtgaagagaacacaggagggaccgagttaaacagtgtgtttgtgtatgtctgtgtatgggtgtgtgtctgtgtctgtgtgtctctttgtggctgtgtgtcctagagatgtactttagttggagtggtcagggaagttgagaactgaaagaaccagtcaaacaaacattggggagaaggggattatagcaggtacaaaggtcttgaatatccagcagatatgaggagcagaaaggctatctttttcaatcacttaaaaaggaaaagaagtgaaagattgctgtcttaagaacttaaatttatatggcactcatgtatagatttccagtgaaaagttggacaacgtgaaatgatgggtttcctacctacaagtctccagtgtttgtctttgactggggtgttttctgtacatatctgacctgatttctgttgctagcctgtcttcccaggggccttggtgagccgaggtcagagagagtggacttcacctaggaaaaaaggaaaggcttctgacataaaagtgcccttgaaaatgttctgctgctgtaaatcccttctctttacacaaagtttaagaccctcccaagagtttgacttgctaaactacaagagcatttttattaggtgtaagatctcactttgactttaagtagcaagtgacacaccaggcaaccctcgctgaattctctcttgccataagtgcatagatttcagtgttctaatgcctctctgagctaaatttgcctctgatctgagttctaaatgtaattggatagtagatatatgtgagtaaaaaaaaattctaccaaatggttggaatagttttcccaaagaatgtaatattggccttcagctggtaataggatgtgcctgctggatgaatgacatggttgatgcaaaagacagatgtaagccgtggttccccaaactgcagtagggatgagcatgacagccacacatatcaaaggccaggtactgatattcttactggaaagactgctcaggatgtatgtggtgttctttttcctggccacccttaaggagtttatgaatgggttccatcagcttcaaacagcaaacacagtttggcctgtatgaactgaaacccatcacacatcattgccacgatcattttcctcatgtatgcaagttctcaagtatatttttggtcacaaaacagcaaaatcatgacaaaagcaacaataacaaccaaaagtaactaaatacgatttttatttagtatgaaatgtattgcattgtaattatttcaacatcataacatttattaaagatgtatgtatcactttattattctatgctcatcccccctctttatacaaaatggagcataatctgcacattcattgttctgcagtttgtattttgcacttgacagtatgttgatacaaagagaagctacttgtgttgctctggaagaactttattgagatataactcgtatgccatacttttcatctatagaggttatataatgtattgatttttagtatatttacgtagttgttagttaatatctaccattctttgaccataatgaataacagggttttctctgcacagatatgtccatttaagtaaagatgccaatgcagctaaatagaatcactcaaaaacaactccaaaatgagccagggagagtggagggaaggaaaaggaggaatgcatccaaacatagccctacgttccatgaacactcagtaacatcatcaaaacgtgatgcaattaaattttaccaggtttactgctgtcctgatgctttccaattttttttgacaacagttttgcctttttcaaattcaaatggtataattggggcttggtagttgatgtttatcttaattgaaacagattctcttcatccttttgctctgagactcccactttgaggctgaaaggtcattttaaatctgcagagcactcgagaagccacataatgaattcaaacaaattcatgcctattaaaaggaggcttctctttctcaacttccagagcttacatagaataaaccatttggtttttgtctgactttcttttaaaaggaagttattgtgcttcctttttaatgctctaactacagagaatggggaaatcctgttttcatttattcttatcagaaagaaagtgtattttgctcagtaattgcaataaaatactactggggttacagctactatacttgtcaacaaatttaagggatattctttagctgcattactttaaggatttcttgtctatcttttatctagcaacttcattttttaacatttactctatgtacttgtgtaaaggtgcaaaaaatatatgtacaaaaatgttctgctggagtttttgtaacagaacactggagaaagcctaaatgtcaatcggtatatggctgattgaacaactgatgcacaactataagacaatactgtgcatctatgaggaagacctctctagtatgacactatctccagatgacatttactattgtattatttttatactttgaaaagaagatatgcacactcccatgtatccattttcactagttttctttgtatatactcttagagtttatgtaagtgcaatgaaaacataaattctattctcttcctccctttttaaacaaaaagaagtataatctgcacattcattgttctgcagtttgtattttgcacttgacagtgtgtcaatacatagagaagcttcttgtgttgttctggaagacctttgttgagatataactcacataccctactcttcatcaatacagggtgtataatttcgtgatttttagtatattcacacacttttgcaaccgtcaccaaaatcaatgtagaacattttactaccactataagaaaccccttaccttatagttatcaccctccatctcccccattacctgctccatatcacctgcctcccttccaccccacagctctaggcaacggctaatctacgtttttttcctctataatttgcctactctgaatgtttcatataaatggaattatataatatgaggtcttttgtgacttgcttctttcacttagcataatgttttcaagtctcattcatgttgtagcatatatcagatttcattttttaggaccgaataatattccattatatgaatataccacattttgcttatttattcatcagttgatagacacttgcgttgtttcactttttggctattttgaaatgtgctgcaatgaacatttatgcaaaagattttgtgtgtgcatatattttcctttcttctgggtatattcctagtagtggaattgctgggacaaatggtagctctaagtttaaccttttggttattttccagtgtatctgcattctcatgtttcttacagcagaaagttattctcttgaatggctgcatcattattgatgtagtcaaggtgtatttttaagtggaaaagttaaggcacaatgttcccagttatggaaaaatatgctaagactgtacatacataaatatgtttcactcaaaagcatctttctgcgtatgcacttaaggtgatggtagaagttgctagctttgaggaagaggtggctacacgtttggaatctgaggtagaagggggctgagtactcaccattttaaacttggggaaattttactatgtgtgctaattaatttttcaattgaaaatttgattcattaatgtaaagaagaagaaatgtaaaaaataaaaaagaagaagaagaagaaatgtattttcctggactcctctgaccaatgttggtcaggccaggggcttcttgacctgtgctttgtttgagtcatccggcaccatgaggtgcttagtgctgtacaagcactcttcttgccatctgctctgcttgacatcatttttagttattaggacaaaaaattaatgactgcttttctatctttaagccaagacaccatttaaaaaacagacatttagctcttactctaaattagtgtttcttaaatgttttattcaaatcaatccacatcaaaagcaaaataggagggaaaactagggtagacatctgagtgaaccttgggattgagaaataggagggtggtatgtgaactaatcattaatggtattagcaaatagagctgggcagtctgtctgaagtgcttcccagttttttgtacattcttctccaagtatcatgtgttggtgactggaagagggagtctttactttccgcacagtttccatcatgtagctctggaagggctttgtgtttgttctcatctttgcttgagaatcagctgtcttattttgggcttttctattttttaagacaaaacctacctatagtggttatacatgaaacacaccagtagatttgatttctgcctttggttaaattagtttgccttattaaatgataggaaagaatcaaaattcgtttgccttatagatttgttcattcttatattcactcatgtattcattaagcatttatttattcaacactcctatgacatcactcctcactgagtgatgattccttctagggtgccatagagggcttgatttccagctggaggaagaataatttaatatcctttttaatgatcaaaattctaaccaaacccaattttgaaaaataacttgactttgcctaaaagtacattaagaaagatatagaaaagagattctatgaaaatgaaatttaataatgtaaaataatttggttttatcagaaattcataaacagactttacttagagttaaaagtccctttgagaggagtaaaatcattaatgaaaaaaatgcatacattttcttcaatcatcatctatatcccatcgtgataatgaggagtacgctgtgtgtagtgactgtgtttgcaggtggagggagtttgagtaatggaagtaataaagatgctcccagaacaagtaccgcatccaattagcttgccaattaacaatctattcctgaagtatttgtttatgaagatgattttaactagagagaagtcatattttattttgtttatatataaagatatgttaatcataaaatgtattcctttcaaacagttatacatttttcctttggcagcactattgtttattttaaaggaaaagacagtaactaatcacagcatttttaaagaaacaaatagagattatgctgctgtaaagccagcataaagccatttttccaaatgtcaacagagttaacaaagaattttatgttgtaaaaacctcacagttgcctagtttactccctcatcaaaaaaagagggggcaagattctttgacatttttatgtataatgtgactagagaatgtgacttcagtgatgatgatgatctaattgcaatgctaagaaccatggctgggctacgactgtgtgtgcacgttgttatgctggggagcaagggtacctaggaaagaaagcaataatgaaagtatcacttgggtatttgtttatttctggatcttattctatctgctccatattatcactttggcatttaaaatctagatgatggctgggtgggtgcagtagctcacacctataatcctaacactctgggaggccgaggtgggaggatcacttgagtccaggaatgtaagaccagcctgggcaacataggaagaccctgtctctacaaaaaaatatttttaaaaattctccaggcgtggttgcacacacctgtagtcccacctactcgagaggctgaggtgggaggattgcttgagactgggaggtcaaggctgcagtgagctgtgattgtgccactacactccagcctgggtgacagcaagaccccatctcggggaaaaaaaaaacccagatgatatggttaaccatattcagtcattattcagttattagaaaataagatttacaaggcatccatggaggggaaaacaattacacacctggttagttgggctgaggcttgcagagataaaatcacctgcacactgttgcagagccagtgctccaacctagacttccggacaccaaagcctatggccattaagcactctgctggactgtatcttggatagtttgctttatggggaacgtagtacaactttacaatacaactttaaaaataaagtatagcagagtagcagtttgtccacagtcaaatatgaaatatgtaaacatttcacaggttctttttttaatttttattttaggtttgggggtacatgtgaaggtttgttatatgggtagactcatgtcacaggggttggttgtacatattatttcatcacccgggtattaagcccaaagcctaatagttatcttttctgctcctctccttcttcccaccctccctgatcaagtagaccccaatgtctgttgtttccttctttgtgtgcctgagttctcatcatttagctcccacttataagtgagaacatgcagtatttggttttctgtttctgtgttaatttgctaaggataatagcctccaggtctatccatgttaaaagacatgatctcattcttttttatggctgcatggtattccttggtgtaaatttacctcattctctttgtctaatctgtgactgatgggtatctaggttgattccatgtcgttactattgttaatagtgctggaatgaacattcgtttgcctgtatctttatggtagaatgatttatattcctctgggaatatgcccagtaataggattgcatggtcaaacggtagttctgctcttagctctttgaggaattgccacactgctttccacaatggttgaactaatttacactcccaccaaaagtttgtaagtgttcccttttctctacaaccttgctagcatctgttattttttgtctttttaataatagccattatgactggtatgagatggtatcttgtggttttgatttgcatttctctaataatcagtgttattaagggttttttcatatgcttgttggccgcatgtatgtcttcttttgaaaagtgtctgttcatgtcttttgcccaccttttaatggggttgtttgttttcctcttctaaatttgtttaagttccttatagatgcaggatatttgacctttgccagatatatagtttgcaaatattttctcccattctgtaggttgtctgtttaactctgttgatagtttctttggctgtgcagaagcttttaagtttatttagatcccacttgtcaatttttgcttttattgtgattgcttttggtgtctttgtcatgaatctttgcctgctgctatgttcaggatgggattgcctaggtcatcttccagggtttctatagttttgggttttatatttaagtctttaatccatcttgaatttttttgtgtgtatggtgaaaggaaggggtccagcttcaatcttctgcatatgggtagccagttatcccagcaccatttattgaatagggagtgttttctccattgcttttctttagctttgtcgaagatcagatggtcctaggtgtgcagttttatttctgagctctctattctgatccattggtctatctggctgttcttgtaccagtaccatgctgttatggttactgtatccttgtattatagtttgaagttgggcaaggtgatgcctccagctttgttattttttattagaattgccttggctattcgggctctttttggttccatatgaattttaaaaagttttttctagttctgtatttcacagcttctaactacattctattgttggacatctttatattttatccaaataggaaaacattaatttaaaattcttgtcatataatctacaaaatatttatattcaaggcacaatgacccttacatattctttttttcttttctttctttctttttttttttttcgaggcaggatcttgctctgttacccaagctggagtgcagtagctcaatcacagctcattgcagctttgacctcccatgcttaagcgatactcccacctcaacctcatgagtagctgcaacaacaggcgtgccccaccactcctggcttgttttttttaattttttttgtttttttttttgtagagacagtgtctccctatgttgcccaagctggattcaaacaatctgcctgcctcagcctcccaaagtgcttggattacaggtatgaaccaccatgcccagcccttaaaatagtttttattataaaggcaatttatgtgcattctaggtttctttaaaaacctagcaagaggccaggcatggtggaatgccagaaatcccagcactttgggaggccaaagtgagaggactgcttgaagcctagaaatagagaccagcctggcaacaaagcaaggccctgtctctacaaaaaataaaaaataaaaattatttttttatggtgtgtccctgtagtaccagctctcaagaggctgaggtgggaggattgtgttcagggtgcagtgagccatgattgcaccactgcactccaccctgggtgatggaacaagactcttaaacatacacacacacatatacacacacacacaatacgacacacgtatagaaaaaataaaaatacaaatataaatttctcataacctcaacacactcccaaataatcactgctaattcttagttattttcttctattctttttccaagcaagtatgatactaatagcaattacctggattgtacagttttaatttctttttttaatttagcattttatcatgagcatttttccatatcacttaacattatttcaaacattacttatatggatacaaaatgtttcaccctaaaaagattttgtaacttatgtatttgccaattattggatattcaggctgtttctagcttttcccaattattaaaattatcagcaaggaacatctttgaactgaaacattggcttatctctgaatatttccttagtaaaataactatgtcaaagaatatgactattttaagactattaatatatgttgcaaaaaatacttctctaaaggttataccaggttacactccaagccacactgcttgagagttctcatcttactgtgctgctgcaggaaatgtttttcattaaaaaaaatctttatccacatattaggttaaagtggtatttcagtgttgttttacttaacacttttggactactggtgtgaataaaaatggttttaatatttttattagccatttatcttctgttaattttctgtttgtctcttcgcttattttctattggggttgcatagttttttactttttgcaagagttctttatgtattagatagatgaaccttctccagctcacatttattgtaattatatattccaatttttagtcccctttttacttttgttcatggtgttttatacagtcaaatttattgattttttttcttttgtaacttctttctttgctttaataatttgagggcttttatcttaagagtagataaatgtttagctacattttccgtatttgtgattttttaacctagctcttaatctgtttggaatttatcttaatataaggtagggatacaagtttattttttcccactatacgtctcaggaccatttgttacatgtgccctactttgcttattgctttgtgtcacagataaaattttatgtatcatctatcatgtgtagacacctcagatataaattacattttacaaataacatctcaatagaaacaagtagaaaaaaaagaactctggtgcaacccattgagagaaacatactacattacaactataacaatgatgtaactaaatttctatttgccttctaaacctttttattgcttgtagccatttgctaactcctgaagaaacttttaccttttcttgtcccagggagttgattatttaattacagtagcataagacaaaatgataaggattggaatccgcaatgagccctttcactgggatgaagcagaggctgatgggactgggtggtaggtgggtaaggtggcagatagatgcaagagcaggaaccactcaccaggcactaggaaaagctccatctagccaggcatattggcaatagtgtgccctgactagtctttgggggcaaaacataacagtctcctaaaaagtggctcagaacaggtaattcctagacatatgcccaggcgtgaacaggacaacttattgaggtatggaaataaaatcttatattttttcttatccgctcacaaattttctttttcttgtattttgtaaaatagataatattttgacataatagtgcaagaacataacttattgaaaataaatatacgtaatggaggtgcttgcacttttttttttttttttttttttttttttactaatagatacggtatccaataaaattggtaatcacttgtctggatcatgtgacttcaggaagctctatacaccagcttgcagttcatggatgggacaggaagagagtatcttaagcctatgttggaaggccaggtggactggagtctcagggacggaagataagcacagggaattaaagcagaagccagtagtaatcagagataagacgtatgttcaagttaactgcagcaggatggtgtggtgctgggctcctgaatctgtttctgcctaaagtcatatctgtaaagatcaaggaggaggagccagagcagcaggtgaggttcaagtgattaataacactggaaaggagaacaggttgcagaaactatggctcaggctacctattcagccattttcattttttgtaatgcaagtgcctattacataatcaagggtatccttagtaacatatgaagcctacattctatttccatttttaaaaagttcaccagtaaacaattgtacagcaaattttatcaatgtaaaaagccattgtactctatccagtcaaaccatattcacctctcctaaagtgcccattacggaggctctgggaaattgaagttgcccttaatcttgagttacaatgggcagggcctctttttttctctaaattttactcaataaatgcaggcttcctatgcattaaatggtgcccacaaacattgaaactactagctcacctcctgaaattcagcactttactatgtgtctttcaatgtaagagcattcactaatttaacaagcattacataacatgtgtcattaatgagttcagttagctaggccatggaatagatattcctgtaaatcaactcctttacagttactaactgacttagtttcatggcagaggcatttatttcaattagactgtggttcctgttgagataaaatgagatcaactatgtgacatgattttgaaaaccatattatattggtgcatgaatgtatatgtgtgtgggtgtaggtagtttacagacagaatgtgtaacataggcatgtggcttgtaactgaaacttttacaaaacctagttcattctcattctataaaagtgtgtacacacatgtgcatatacacacacacactgtgataatgtatctgtgtatttgagggttataaatatttagttgtagagttctgacaaagtagtaaaatagtctcacttcatctggataaagatcaccatctggaactataaaaattgcaatgattccaaattgttgaatagttggattgcatatttacttttcagtagtatgttggcatgcatgtagatccagccttcctttcaacaaagaacagtggtggaagattcccttaaatggttactctttcctcaataagagcaaccatataaaaattatagaactattagtcatcatagttgaaagtatcgcataagattaacagagtccccatctggtgatatgtttttacatcagatttattaagatcagagcgggttttaactagagcaatgacactgctattattaaataagagacggaaggcctaatacataattgtctatttctttctagacatttatgtgtttttattaggataatgaatacagaattatcaacatcatgatcatagtttttttggtttttaagtagtatctgtaatggcaagctcatttttattttataacctacccacacacagacctacagtgaagcaaaacagatgctgaaatatgtttgttgccattggctttgaagaaacctcagagaggtttgcctcagtattttaaaagcaaaatggttggtacctttctgaatagatgtcattgtgtccttcaaacaaagctgacactgtagaaaagaaatggattgccttgtctttttaccagtgaacatcttcacctgaacaaaactcatcaggaaaaataaaggattttcgaagtgtagttgttgtttaagcagatactagttattccatccttacaaatattttatatataatatatacatttatatataatatttatatgtatatttcatcacacaccaacatccacagacacacacacacacttgtttgactacttcctctattccttgaaacgcttttgagagacctgaaatatccttgtatggcaagaggggaatggaatcaagctgatttttccatttttacaatgtgcctgggattgtgctttgcagtttagtggcattttctgattcaacctcacagagccctgcatggtataatattgtctacatttaagatgagaaaagcaagatgtggagaggctaggaaatcttcccaaaggcacgaagctcctggcagaaccaggatttgaggccaagtatcaaggttacagtacagatagacatacatacactcaattataagtaaagtttttatgaggctgggtttgacagcaacatgataagtagaagtttttgatttggtaagatttttcgaaaactcagagagtttattgccaaatttatttttctcctagaaacatttttgttgttgttgttgctggcatggacagttataaaaataaattagaagtaaacagataacagtttcctggctgccttcatgtctgtgagcctaacacggctcccagaaggaaaaaatatgcctcaaggaggcttatatgatattgcttatttagggaacctttgaccacttatttacaatatccagttacagctgtgctactttcctttttgggcaaaagcacatattcgcttgaccattattttggaggaagctgatattgcctgtcacttccaacatgtccttgtgtaccctagctcataattgcagcatttaagcttggagctcccctaacaacacaattattgccaaatttaccatcgttgggaacattggtgaggcctgcttcagaggcctctttgtcagcaagaagcatgttgcagatatgcttcaccttgcatcataaatgcatttctaaaagtagtttcctattgaattattttgtaataacatgtttttctaactacaaaataaacacatgttcattgtggacaaattgggaacttcagaaaattcccaataaatattccaatatttattaatattttataaaatacacataacctgtcattgcagcttccagggatagccatcattaaaacgtgttggtttatttcctgaataaacctttaaagcatatacacacataccccacaaacatgctcacacacacacatatatatatatatatacatttttatggtcatatatatcctattatgtgccagatgaaatcaggtcggtctctctatacacacacacacacacacacacacacacacacacacacacacagacacacacacatacatacatatatctatacatatatatgtatatatgtaatatgtacatactatgtatgtgtatatatgtgtatatatgtatatatatatgtgtatacatagtgtgtgtacactgtatacatatatgtgtgtatatagagcagagagacctacctgaatattcatctggcacataataggatatatatgaccattaaaatgtatgtatatgtatatmtatatagtgatgtgtgtatacatatattatttccaaattttgaaaatttttatttattattttttgagatgaagtcgccctatcgcccaggctggagtgcagtggcacaatcttggctcactgaaacctacgtctcctgggttcaagtgattcttgtacctcagcctcctgagtagctgggattttagttttgccccaccacacccaactaatttttgaatttttagtggagacagggtgtcaccatgttgcccagggtggtcttgaactcctgaagtgctgggattacaagcatgagccaacatgcccagcctgtatatatatataattttttattctgcattcttcgcttgacatttttaagaagtattttctcgtgtcatttaggattctagaaaaatctgatattctaatggtgacataggaatccattttacatgtaataaaatgatttattcaatatttagccattctttcattgttgggcattttaaattttcctcttttttctttattgtagtggttcactaagcatctttgtagaagaaatgttaatctgtatctctggttaattactttggcaaaatttttggaaatgctattactgggtcaaagagtttaaatggtgtctaaacttgtcaagacatactaaatatacttccagatagtttttacaacaaattttaagcctacatataaaaaaacagttccggtggctcacgcctgtaattccagcacttttgggaggctgaggcaggcagatcacctgtaggtcaggagttcgagaccagcctggccaatatggagaaaccccatctctactaaaaatacaaaaatcagctgggcatggcggtgggcacctgtaatcccagctactcaggagactgaggcaggagaatcacttgaacctgggaagcagaggttgcagtgagccaagatcactccactgcactcctagcctgggcaacaagagagaaactccgtctcaaaaaaaaaaaaaaaaaaaaaaaaaaaaggttattttaagaaattgtatagtgaattctcttttttaaaaaagggaaaacatttatatattttattaatatttaaacctgcagttttataaaattttgtctagtccgacactcttgttttacaaatgggaaattgaggccccagttccatatgagagacaaatacaaaaatctgccttctaaagctggtcaaaagcagttatatctctatgatcaattcagaagttgagtcctctgttgaaatgatttcaatagttgaggtgattttactgtttctctttaatgttgtgatatattttctctcttatacgactctatagtaaaaacgagaatcattttactcaatctggttcatgtagcagtatcaggctgtgaaattcatactgctcagacactggttctccaactgtgatgtacgtaagaaatactgtgcctgctgtctcttaaatgtagagtcctgatcttcatccctaagaccctgattcatttgctttagataacactgagagctaatcatttttagcaagcatcccaggtaattctaaggccatattgtgagaaaagccagtataacgatggagaattcttatgttgatgctctgacactggctctacatctgtccataatttatttaactcctctctgcctcagtttccttatctataaaggaggaaaggaaatgccagtctcttccacctgggattcttgtgagattaaatgaaataagccatgcaaatgatttaacacagtctacagcacacagtaaatactcaataaatgtgaactcattatcgttactgttgtcattggtattcatattgatatcattattcctgcattggaaaatgtaaatgtacaattttaagtgattagcattgctggtggattattgattgcaatttgtcctgctgtctcttctgacattgctaaatttcatttacttaaatatttcccttatttttctcttgttcccacccatgcaccccagtggagttgaaattgagttgagatcaaatgcagcaggtgttgctcagagaatttggtaagactagttgaaaaaagatcagtgaaactttatcaaaaatagaatagtgattctcctggtcacctgcttagagaacccattaagaagtgtgaggttctccaggccaccatagagctataatctgcaccttgtatcagccatagcaggtatttgcacagtaaatttcccctcacctagtttattcataggtctgatcatagcacactacagactcaaactcctgggctcaagtgatcctccaatgtcagcttcttgagtagctgggactacatgtgtgggccaccatgcctgaccatggagttcttaaaaatggatattgacatacatatatagaaaattcattcaataaatagttatcactttcctatacctggtgtgagaattatgctagatattggaaatacagaaatgaatatattaatattaaagtcacttaactaagcttttccctgtgataatctttctgaaacaaagcaaaatgatacagaattctttaagtactattcaatttgtggctatttcctcctaaagatcagtgtatctgaacttgctggctgctagatattttagtcatttcaaaatgtactgatttggctaaagaatctactttgaccaaaataggataccttaaaatacaacatcagcaaaatatgtgtaaaatccccagagaaaagccctcttaaatgcctacttatttcaagtcaaatttagttaaactacataacttagtcccctgagtgtcagtggaatttctcccagagctgtgacttcgtcaagtaaagttaccctctctcttgacctttggaaagagatggcatttgttgatagttttgtgtgtgtccttaagctgggcgcttaacaaatattctctctaacaaatattctctcattaaaacctgaaacagccttttcttacacctagaactttgtaaagaatatgtcaggaataggacaatcaccttttaaggctcagacagccaagaagctgttttctttttcagtcaagtgtagagagcatccatgactgccaagttctcagccatggctggtacaggcgggtgcagtaggaggcacagttgccactcctcagaaagaacagggacatggctggacccattgtcctacttggctcagggccaggcagggtagcagacctagttgttgaatgcccttttattgatagttatttaacttcaataggatcttgtttttatggtaggcagatggtccttaattggtttgaactttgtcctcttttcatagcagaaattcttaatctgctgcccacaaataagctttggagatctgtaactcccttaaaataacaaaaatgtacaaagcatttagtaagtgtcatacagtgtgctgagcacttcacatgctttatctcctttaaatctcataaagactcatcacataggtactgttttcattcccatttttaaaatgaaatttaaagagactaaatgacttgaagaaggtcacaaaactaaatagcagtagggtcattattttaggccaggttatctaactccaaagcccttagcttaatcactaggctatactgaactttatggaattacatccaaaagggatgtgtgtgtgtgtgtgtgtgtgtgtgtgtttgtgaatttttccgaagactcacatttccaaagatttataagtcatgtcgttctcaaaggggtctctggtctccaaaatttgaaactctttgcaacagggtggctatgttttagaatgacataaacagatacaatgttctccagagtccagagcagggtctaaacctattgggatactatacttgtgttatcaactgaaccacttggttagttcactaggaagatctgcaggtcttgagctgagcttagtgttttacagacatgtgccattcattcatcacctacaccactcatcaaatatctgaagaactatgaaggctgaaggaaaataagtgggtgagcacaggtgcaaataaataataaatttggagcattctatttcgtgttatttcttgctaaaactggcatattaccccaaacatcaattgcaatatgctattcaacaagagtttttaactagtttataataggaaaattgctcttttttaaaaaccagggttaaagtcacatcctttctctcctctgacaaagtcactgtcacataaaataatggtcctagagtcaaaataataacagaactttgttctgatggagactgtaaatataccaatactcccattaaaaatataggtgggctgcctgaactgagaaggttgtgtcatggctgttagttttaataactggaaggcttgacagagataattgcgttagtgcttcactggcctcaagatgcatgcaatgagtaaaattaagaccatcttattaaaataccaaagcattgtataggaaactcccatgtattcaaaggggaaagaagaaaaaggaatttcatatttacggagcatgtactattttcaaaactctgttctaggtgctttcacattcattaactcattttaatatgtgagtgctttgtaatcctttttgagtgttgcaggctcagagagggtaagaagctttgcttaaggtcccctagctggcaagtaacagaacctattcaaattcagatctgatttcaaagtgcatgtagtttttgccacagtacgatgcttggggagctaaatggcatttgggaacctagagttaaagcatcagtattttttactaaggggccattggatcctagagaggcaacgaattataatggataaaaatacaaatttcaggcaagttacttctcttagcaccattgctttatccggcatagtaataaaaatcaaatgagacaatggatatgaaatgctaaaaatagtacattctctgttgttattatctattgtgattattgtgttacccttggaaaaaggcctgtagaatagtggcagctgggtcccctggacagtgaactaccaacctaaaaactgtctgggcaggcttgcctttgggagttcttgtatatcagctctaattctgtccaggaattcagaggcagagagcagggttgaggagaatttcacaggtggtaagatctccggtgaggaggcatttcagcaacgtgatcagtgttgccaaagctatgaaagatgttgaagaacacactttctacctgagatatcaactaaagtttgaagcttcaggagaaggcatagttctatcaacagacagcagtacagcaccaatagttaaaccctatatggtagatttaaatgctgagccttcaaaatcatttgcctgttttactttagctccagcaaagggatagagaaacccttcttctgtcatccctctcccatgtttgctgttgcttaagcagtatttattttggtaacaagaatacctggccttgccacttaatctccaccattccaaagaaaacctttctgagatcatcttaacgttgtctctaggcaataaatatctctggtttctagttattcccaaggacactgacctcacatttcttactgtcttaaagtcaaaagtacctttgtccttaactcacaccaatatgtatgagactaggatatgagagagattgttacatcttgcttgatgttttgacattataggtagtgtaggttttgttattacagtttgacttttgaaatgcgtatgagatttctcaggtgaaatagagcctttgatgtggtactcaaaagggataactatgactcagaggaaccatttctaaaagatggcactctttctccttccagttctttctgttcaatagtagggctggggaaaggcagaggcagtttttgttatttcaaatgacagcatcaaagatagtaatccacggtgctcaacaaaagtcgaatgaccttttttccttctccattcataaatacataagagctgatgcttcattatgtttaaatacaaaatgcacactcctactttgttttcctatatgtgagttctcatgtattcttcaaatgctcatctaattactgttacctactattccaaatgcaaatgacaaggtcccagtttactgttgatcctatattacaagagtcatcaattttggttgagaaacacaaaggacaaatatctcattattgtgctaaccatgcctattattagttttgtgcccccataacataagtaatagccccaaatacatggcacttatcacacaccaggcataattctaaatggcatgttctccatgttatggaagaagagactgaggcatggagagagtgagtaacttggccaaactcacaaggctacaaaggcagagaatcaggttttgaactcagggctgcctagaccctgtgttcttaactatcatcatatagtgtctctcttactgtttctcactgaagatgagagaggattaaaatctcaggaataaatgtaacctccacaggtaggcttatgcataaaattcagatgcaatgaataacaaaatgactgcctcccacaaaattaagaagcaaacatataatgaggacttactctgtgcacacactggtgaggacacgttacacatttcatatcactgagttcacacacacacacacacacacacacacacacacacacacctatatgagggcagtatgatttccccatgtgataaagaaggaaagggaagctcagacagattagatatattgtctgacattgttcagatagcaagaagcagattcaagatgcaagcatagaccagagaccattatttgagaccatgaggccttttctcaccagttattcattcacttaatattaatcacttaatatgcatttgctgagcacctgtcgatgtcttgtaaatcagtgcaggaaaatcataagatttgaaatcacagcatctaggttcatatctcagcttcatcattaaccagcaaaccagtaaacctccctgtttgcagtttcattatcaataaaatgggttgacaaaaaatttatttaacagaaatgttatgaaatgcaaataaaataatggatgtaaagaaattggcaaatggtcaagcaaaacatgaatgttaattttatgatgattaaagtaaatggtatggagacccccaacctcaaatagctgggaaggggtagttgataaggggagaaatgtgtttaaagccagttgctttattattttaaccctgagataatgctttattgacagtgtgaataagatgtttggaattgtggaaggaagaactggaggtcatattacacatttcttactacatgttgagctttgaaaagtgagaatgatttcatgaggcagaaattggttgggtctaaaacttcattatctgtaacacatactccagagagtgagaacagtatgaccagaagtatctttggaggggctagagacaagatttgaagggaattaggacaagattttaaagtaacctaagtgccgtgataaagaatccacttttataggcaaaagtagttattcaaggaagtaaaataattacattttctagccactgcaagctatctctttttccttccttttcttccttcattccttcttcctttcttcctgcctttctttccttccttccttctctccctctctccttttttcccttctttctccatcccgtttaaccacacacaaaatcccaacagcagcgtagaaagtggtgttgaagagctgggcatgtgggcagggacaccaccaaggaaggtggtgtaatatagcctggtgacgacagctttggctcttctcaccactcccgctcccgagtaagcacagcatagaggaatatgagctgagttcagtgctgtccagttggaattgggaatgttaaagctagaaggtcagcaagtccggtgttctcaacctgacaacacatcaaatagctatgacagccttttgaaaatagagattcctggatccagcttcagctttaccgactcagagtatccaaaaggaggcctaagaatctgtatttttaaaagcctctccaaagtgatatgtagcagtaattgaaaaggacaatctctttacttcattgatgaaatagctaagtcccagagaagtcaagaggcttgccaaaatcacaacgaggtagtagcggggtcagaactcaaactcaaggctcccaattctcaacccagtagtattgcccagcatcagttcttatctttgcgttataaatacattcctgcccatcaacagtggattgcaaaagcagggaggaagagagggtggcaagggtcaaaaaatagctatcaggtcctatgttctctacttgggtgacaagataattagaagcccaaacctcagcttcctgcaatatagccatgtaacaaaactgtgcatggacccctggatctaaaatttaaaaatcaataaataatacaaaagaaatacattcatatttttctgaaatattcttcagaatatcaagtgggaatccctttgttttgcaaagctggtctgatatgtttaagtaaatttaaccagatagttgttttctgtatctccctctaagtattaacaaacatttaccatacactataaagcattacaatattgttaggatgattaacaagagtaccaaaatgaaggactcttgctaaaatccttttccagctttttcattctactatttacagacatgtaagcacatccattcatttcagcaaaatgtaacattccacacaaaggttttgaacattgtgctcggctagagaatatttctagtgagtgctcataagagacattaaaataagcatttgtctttcattcaagctttatgaaggattaaaagtaatccaattgttcaatccttcatttaaatctttagtccaaagaacagaagatttgggattgagtcgtaatccagccatttaaatctatgagactctaggcacatcattgccctccttcctgagcctcagatttttcttcagcaaataaggataaaaatctacactcccaatcccatcacttattgcccagggtcactgtgtgaattccactgaacaatgcctgtgaaggtgctcagaaacaacctgcttgtgagggcataagaagcacaggaggaaaaggcctttgggaataattcttttgtctcacccaggacaggttatctgaccatcaggggcacagatggaactctttttggacatggcaagtgggtaaagcacccaaggtgccctgagagatttttttcatgtggtctgaagggccacatactttcgtgggattagtggcatatgtggtatggaaactcataattacattgcaaatttaaaggacagctctgtaggaagaagccaagagcagaataagcatagatgtggtttggattttatttttcctcttgtcaaatttaacttaagttctgaattctataaaaaaagaaaaagagtggtgaaacagtcatattttaagatttttaaaagtcttaaagacatggaaaaagcaaagacgatacctacactgcttatttaaaaaaaaactcgatttgagtttcatgaagtactggcatttgctcactctgtaattctcaaagactattttcaaaatttggtcaaattaaatttcaaaggtcagcaaagtatataatcatgtttgggttcttttttcccccaagtttaaaaaactgacatctatcctttttttaggctatctgaatgtatgaaaaaagagtagaagttattttacagcatatatttttctgtaaaagtaactacatttaacattaaattatttaccagtggtattcattttatataagcaggctggagatggaggttctatttacatatttccactgtcatggtacagtatagtactaagtattttacaggccagcaatcaaaagaattacaattgctactaggaaacactaaatctgaggattctgtcatgactatgtatagctggttagaaaaatctttgctgaattgaatggctttctcattacagatggccttgtttacactgtacttagagttctgtgtgccattttggactcctcattaaaaaagcataagtcattttttaaaagaggataagtgggaaataaaatgggagccaagattatatcgaataaattctacaaaaaaagaaaaaagaaagacaaaatacacataattgaatatcataatctatctagaaaatagatgaagtggcacaaaaatggatgaatatattcaaatgtttgagaaatattacttcataaaaatgagagaaattttaatggctggagaagtaaaacttgattttttatttgagaacatagttaatgtcaaaacaaagaaagtcagcaatgaacattgcttctcaacttgaggtgattagagaagaggtcaaatgcctttagaaaacagctgtgcatttatcttggctgtggacctggcaagtcaacaggatttatgaatagcctcaccatgaatttggtcatcctgaggggaaggaaaaccccaaattaattttggagcagaagatcagtgtaactactaccatccttacgtcttctcaatgagcttcattattcctcccagagtggctagagtaggtagttgatgagcatttgtggaatggataggtatctcttttctatgacctactctatcaccctcaggatctattaatcctttgagtttgatctctaaggtggcaatgaaatatttcttacaccagaaatacactgaaactcagagaaagagggctcaaatttgaggagagtgctatactggcaagaggatgccccaggtaatatcctttccttcttctagagaggaacatttggctctagaaaggcatttagcctatgagttcagaacaggaatggtcttaggcatctgattcaacctacgacattgccagtctgaaccaactcatcctgatcccactgcaaatgagctaggcaacagtgaagagtggttctagtctgggtttggataaattgtgaaatatttctagaatttttctatagactctgaaccatttccccagaagtgtgcacattcaaaatgtcattttgcttcagaataacattttgaataaggcaagcctaatttttgttttttaacagaattttaaaataattaattcacaatatttgtacataggataatgggatattttgttacataaataggatgtataatgaccgagacaaattatttagggtatccagcaccttgggcatttatcatttctatgtagtggaataatttcaatttctttcttctggctattttgaaatatatgatacattattcttaactataatctccctattctgctatcacacattgtaacttatttcttctatccagctgtatgtttgcatacgttagccaacctctcttcattcccctcctcctggtagctatcattctattaccttcatgatatcaactttttttagcacccacttatgagtgagaacatgccatatttgtgtttctatgcctggcttatttcacttaacattcaggtcaattcatgttgctgcaaatggcaggattttgctctttttatgactgcatagtattccattgtatgtgtatgtgtgtgtgtatatatatatatatatgtattttctctatcggtttgtttgttggtggatactttggttgattccatatcttagctattgtagatagtactgcaataaacataggggttcaggtatccctttgatatacagatttcctttcctttcctttagataaacacccagtagggggattgctggattgtataatagttctacttttagttttctgggaaatctctatgctgttttccataatggccatattaatttatattcccaccaactaagaattcccttttctccacttcctcaccagcatctattttttttttttttggtcttttaataatagccattctaaggtaagatacctcactgtggttttgatttatagttccctgatgattagtaatgttgagtactttttacatacctgttggtcattttacatcttcttttgagaaatgtcttcatgtcctttgtccactttttgatgggattatttgggtttggtttggttttgtttttgctgttaacttgagttcttggcatattctggatattagtccgttgtcagatatatattttgcaaatattttctcccatttaacatgttgtcttttcactctgttgattattttctttgctatgtagagatttttggttttaatatagtcccatttgcctgtttttgtttttgttgcaatgctttgacgtcttaagggaagcctatttcgatctggtacttctgaaatctcattggctcaagtgaagcacgggtgtaaatcctgagtgtttgttaatctcggttctgtgtgtcttctgtaatccagagacaaattcatgtgtcaggttcacacttgagctgatcctctgtaactttgctgattgttgttaagacagaacagaaccagactggctttcactttacacaacaatcacaactgtgtgtaatgattatagacttattctctaacatctcttaagcacttaggtaatgagaaatgtcataatgaaaatatctgttaaccgaggaagatcaagggaacaaaacaaaaaacctaaatgaagtgtgaaggtggtagaagtaaagacatagatggtttcacttgggccagagatagattgaatgtgagacatttgaaagtctaatgtactttcagtacgtactttccagtttactttgatggaacgcactgtgttgaatgttattgtgctgacaaataagcccccaaattaaatgacttaaaaaataaactcattcttcatcaagtagcgttctaggatggtgtttaggaggatgtggcagctctccttgctctcagtcacggaccaggattctcccaccttctgtttctaccatccttcacgcatcagcatctttagcatccagctggcagaaaaagaacatcaagataggcatgtgggaggagctatgagccagtcctgaaagtggcatgcaatatttctgctcacatctagtcacttggccaaatctaattgcaagggaacgagaacttcttttatgcccaggaacaggcagagaatggaatatggcagacaacaagcagaatttcctatactcacagtcctgattattgacttctatgctttcccaaggtcattttgtcttcagccagattccatttcaaggaaacatgaaaatgtttcttcactctataaaatcattgttgaagtagatcctgctacctctgtggtagcccatccaacatcttaaaacttttaaaagataatttgtaaccatacataattcacccaatataagaaatcatgagagaaagctaatctcagtgtacttattatacaatgagacacataatgagacatatctttttttattctccactatatattttaaaagaattgaagaggcaagtgattgtttatggccatcgtaagataatattcttatcattgctttgcccagtaagattgaaaaaattgtctgtaattcaggccacacaaccctctgaagcccttcgccattcattcaagccccattaaggcagaaaacccatctgtttggattgttgaggttggaaactgaataatatcacttctccaaaatagatttaatagtagggctggtgaatggtttcctgacctgtttgatgcagagtgcaaacccagaggaaaaacatggtatatgagttttcgtatccattagtctaaaagaatcagaattcggttatattttaaaggcaattatagtagaactattacttttttgttttctgttataatcttacctagacttatttaacatacttaacacataatattttaaggctaagtatttctacaaaggatttatcattcaatcattcttatttagtcaataaaatcttttggagattaatttttagtaagcctaaatacccaaatagccaggaatgtgattgaggatcacatttttaaaacccatccctcaaaaagaaaattgtaatatcttgagagacaggtatggtttgaagatcacccctcttcaaagtgagttcaatatctgacctaatggaatcactccccattccccaggactaggtgacactcactgatctgggaaaaataaacacgtgcaactaacaagagaaattttgagaattatgagtaagctttgaaaatttgggtactgaaaatagagagggagggagagagggaggtgatagggagggagggaaagaataaaaaggaatgaagaaaaaactaataacaatttatctcttaagaaaatagaaggtgcagctgggtacggtggctcacgcctataatcccagcactttgggaggccgaggcaggcggatcgcctgaggtcgggagttcgagaccagcctgaccaacatggagaaaccccaaatacaaaattagccaggcatggtggcgcctgcctgtaatcccagctactcgggggcctgaggcaggagaatcacttgaacgcgggaggcggaggttgcagtgagccgagatcgcaccattgcactccagcctgcacaacaagagcaaaactccatctcagaaaacacataattaattaagtaatgatataaggtgctaaatttttattttcacccatccagtttcttttcttattctttcctgatatgtaattacctcagatgcagatctgaggtgaaactaatgaagatcaagctaagagcttctcactggcctggttccctttcaagttgtaagaagtggtactagcagctgcacgtagttttaggttttgtaaaattcaaaaaactaagatttttttgtattatttttctgaaagcagacccttataattgtataatcttcgtgtaccacaaaaccttgatcccacccctgattgcatggctgactgctgttcaaacagaaggatattcaaaataacccccgttaaaatgccttcttagagatgttccagattatttcttcaaatgtgctaatcaatctcattaacctatttctttaaataagtgaccaactcctagctaaattaaaaaatagttatgaagtttatttaaagtagaactacacagataaccatggtaaatgataaccggtatagaaaaagtaccgctgcgtctaaagatacccatgtattcacgatacaaatatttattgagcaactcgtacgtgtgaggcactgttgtacctgctgggggacacattaacgaacaaagtagatttttaaaaaaaaatctctgcacttgtggagcttatattctaatggggtgagtaagatgataaaataagtaaaaaacaaagttcatcagaagctgttaaatgcgatggagaaaaattaagagtaaggaaggttttttgtttgtttgttcaaaaaaaaaaaaggttaggaggttaggggtgccagttttaaataggccagtatgggaatatctcatgaaggtaacattgagctgatatctctagaaagaatatgccaggcaaagagaactgcaaatccaaaggccctggggagggagtatgcacagtgcttcaaggacagctagggaccaagaggctgagcagagtgaacaagagggagagatgtaggtaaagatgagattagagaggcaccagggaccaggtcactgagggccttaaaccattgggagaacgtagtattttctctgaataaaataggacaccattatgggataatgagtaggaacttgccgagaatgggcttacattttaggaggatcgctctgtctgcaatataaagaataaatgtgggtgggtggctggagaagtagcagggcacatcattaaaatatcaatgtttcaaagtcggcttattaaatcaattttacttgctctatgtcatagaaacaataaataaagacagaaacaccccgcaacactaccttgggtatttttctttgcttgcttgttttttttttttgttgttgttgttaatattttaacttttattttaggtttagggttacatgtgcaggtttgttatataggtaaacttgtgaccccgggggtttggtatacatattattttgtcacccaggtgctaagcatagtacctgacagttagtattttttttctgatcctcttctctcctcccaccctccatcctcaagttggccccagtgtctattgttcctctctttctgtctgtgtgttctcattatttggttaccacttataagtgaaaacatgcagtatttggttttcttttcctgcattagtttgctaaaaataatagcctgtagctccatccatgttcctacaaagaacatgatctcattcctttttatggctgcatagttttccatggtatatatgtaccagatttttctttatccaatctatcattcatggacatttagtttgattccatgtctttgtgattgtgaatagggctgtaattaacacatgcatgcacgtatctttatggtagaatgatttatattccttttggtatataccctgtagtttgattgctgagttgaatggtagttctgtttttagttctttcaggaatcaccacactgctttccacaatggttgaactattaataatttacattctaaccagtagtatataagcgtttccttttctctgcaaccttgccagcatctgttattttttgactttttagtaatagccattctgactggtatgaaatggtatctcactgtggttttgatttgtatttctttaatgattagtgatattgagcattttttcatacacttattggccatatgtatgccttcttttgaaaaatgttcatgtcctttgcccactttttaatggggcggtttggtttttgcttgaatgttcgtttaatttcgttgtagattctgggtattagacttttgtcaggtaatacaatttacaaacattttctcccattctgtaggttatctgtttactctctgttaatagttgtgtttttttttcctgtgcagaagctctttagtttaattaagttccatttgtcaatttttgcttttgttgcaattgcttttggcatttttatcatgaaatctttgccagttcctatgttcaaagtggtatttatttggttatcttccagggtttttatacctttagcttttacatttaggtctttaatccatcttgagccccactttgttaacaagacgctattcctctttggactttagcttgatgaagccacattttgagaaagagtgcattttggaaatatagcatcttagaagtgatcttagaaagtgaaagattggtagtaacctgctgtgagcagtacaaggaaaataaaactgagttattcctgtgggactacagctgactctcaggtccagcctggcctggagagcatgtgcttttctgctcttccctccatactcttagttagtggtcagcacatgataataggatgtaagggaagaaataaatctctacttgttttattctcaatcacagtgacacctgcatgaaattgccagagaaattaaggcctcccaatgactaccaaaaaaaaagacactttccgcttcccattgtcagcacgtattctgattgaatgtatatgtttactacttgaagttctcatgatttctaggtaattactgcaaatatggacctcatactgctactgcaggctttgcctcaagagtccaaataccatggcctcatgttagggccatttgagatcctttttgaaaaagttgctttattgtgctaaaaacaaagacacataatatgagatctaccctcttacattttaagtgtatagtacattattattagctgttagcacaatgttgtacagcatatctctagaatttattcatcttgcatgattaaatgatacacattgaacaacaactctccatttctccctccacccaggcccagcaaccaccatgctacttcctgcttctatgagttcaactactttaaatccctcatataagagggatcatgcaatatttatctttctgtgactgacttatttcacttggcataatgtcctcaaaattcatccatgttgtagcatatgacaggatatccttcttttaaggctaaataatattccattgtatgtatataccacattttttaatccattcgttcattgatggatatttagattgtttccacatcttggtattgtgaatatacataaatgaatatgggaatataaatatctctttgacatgctgatctcaattttttggataaatacccagaagttgaattggtagatcatatggtagttctgtttttaattttttgaggaacttccatactgttttttatagtagtggcatcactttacagtcccaccatcagtacataaggattccaatttctgtatgtccttgccaacaggtttttttttttaataatggccatcctaacaggagtgaagcaatatctcattgtggttttcctttgcatttccttaatgattagtgaggttgagcatcttttcatatccctgtttgccattttttgtcttctttggagaaacgtccatttctttcattgggtttttttaattttgaggggtttcaattgggttttgggggggttttgctattgagttgtaggagctcctatgtattgtagatattaataccatatcagatatatggtttgcaaatgttttctcctaatctgtaggttgtattttcactgtgttttctcccttgctgtgcagaaacattttattttgatgtagtcccacttgcctatttttgctttttttgcttatgctttgatgctgctgtggattaggaaacttaatattgttaaaatgtccacaatgtccaatgtaatctccatcaaaatcccaatggtattttttatagaaatagaaaagcagtcttcataagaaaccacaaaaggctgaatagtcaaaacaatcttgaaaaagaacaaaatatctggagatctcacacttcctgatttcaaaacatattactaagtgacagtaatcaaaacaatgtggtactggcataaagacagacataaaaccaatagaacagaatagagccaagaaataaactcacacatacacagtcaactgatctttgacaaggatgtccagaatatacaatgaagaaaagtcttgaatggtattggaaaatggtattggggaaactagatattcacatgcaaaagaatgaaactaaacctttatcttaaatcatacacaaaaaatccactcaagacttaattataacacctgaagctgtaaacctagaagaaaatttagggggaaaatttcatggcattggtcttggcaataatttgagatgctttcttagagagagtttcagttaagaaaatttttcttaacagtcattaaaaagtaatgtataaacttcaagtaaaacaatttttggttggggctttctggttgccttagtcaactcaggccgcataacaaagtaccctagactggtggcctaaacagaaatgttctcacaattctggatgctgagaagtccaagaccaagattggctgatttggttcctgttgagggctctcttcctacatacagatggctgctttctcactctgtcctcacatggtgaagagagaatgctcttgtgtctctctctgttcttataagaacaccagcactattggattagggcctcatccatatggcctcgtttaacatatgaattctaggggaaacaagatagatttaacctcaacctcaacctcatgtaaccattggtgattaaggcttcaacatatgaattataggggaaacaagattcagtccataacactggcctaataaatacttttcagaaaaattggccttttatcatatcattgtgtcaaaagtgtgctaagcaagtccagcttatcctctttcatttatagtccagacatcaaactcatgctatcatttccatcttgaatctctttattgccctgtgttacttgggagtgtcactgacaagccagaaacatatgttgtatatttccagtaccacctaatgttttactcataagtaagcatatacccttcatctttgtaccagtgtgtgtgtgtgtgtgtgtgtgtgtgtgtgtgtgtatgtgtgtgtgtatgacaggatctcactgtgttacccagactggagcgcagtggcatgatttagactcactgaagcctcagcctcctgggctcaagtgattctcctgcctcagcaccacaggcttgtgccatcatcgtgcctgacttttttttttttttttttttttttttgtagaaacagggtttcatcatgttgcccaggctggtcttgaactcctgagctcaagcaatccactccccttagcctcccaaagttctgggattacaagtgtgagccaccatgcccagccctgggcttttgtttataaaaatcatctgtgaaaacaaagggtaaaacgtgtctgttaaatatcttaactctgtgcaaatatatatattatacaagctaacatgtgtagtataatttagctgtgtaatcttgtaaagtagctaaatatcatgccttctccgggtatcctacttaaatttaatatgcagttttatgattgattgggaaagattgccatctgtgcatatcactgtaaaatgctagtttctacagtctcatctccatagataatcagagaaaagtaaatattaaaatggtgaattttgcaaatcattattttgtttacttcagagaagctatttgacctgcagggaaattttcaatagagaagtatcagtggcattgattagaaacgagcttcataaccttgtgatattgataacaatgggtaaaatatttagtattataaagagggaaaaatgtatgtagtcatccagttacagttactctccccttaagctcaagggtaagcctcccctccccttgagggcaaagcatcaaaatgagttccaatgtgttggctaacagcatgagctacaatacacaggggagagtggagtacaggaatataaacatcagtataattgtgacctgaggtccccaagctacaccctgtgtctggagacctgaggtctgaaggactgtttctgctcattatattcagctggagccccacctaggttgttgggacctccaagccttccacacttcctggtaggaaattattctttctcctcagtgagtaatatctagaaaaaaatcagcagtctccaccctccccagatgttatcacactggaattatggagttgggtggagacataaaagcagctgaaacttttagagcaatctggctccagcatctgtcacctcattgattgcaagggctgattcaggtgatttggccctcagttctcttcctctttcatctctccctttaggttcttcccaaagccatgtgttcaaataaagttaaagagaatgacctagatgaagatctccctgggagaaaaagagtaataaaaatgaaaaacaatagctgctaaataatgggagtgtactagctgccaggcaatgtggtgaatgctttccaaacattttctcttctaatccttataatggccctagagctaggtattgtaattatctttatcagcagtgaaagcctagaaaatacagcaacttgccctagagcacccaaataggaagtggctgaaccaagatttcaaatttaacctgtgttttctaactcttaaataaacatcttaacaggaacatttttggtaggtcaatattttctatgtgccattgttcttactatgtagtgaaaaaggcagctttcagatggtcctggcttcagtgatggctcccaggattcccagcgacattcagcaagatcttccctgtgagtggccttcatagatgcttcggtaatggaggctgctattgatagaggttccttagcagctgctccactgaggccctcattgccccacccactttgggcttcatactgggggtcagtgctaagtataaggtcctgatggctaggatagatgaggaaagctatttactcagcacagtagcaggactctggctcaggagagggcccatatcatggtcaaaaataaattgggaaaagtttaaactagggaagcagtgtctagcaaaaggccaaaaagatgagaaatgaccttcagcagacaaacaattacaaggtcagtagacacaaagtatgcgagcagttgagagcgtggatgaaaggtagattggaactgtattaccatccagtaattccactgaaatggaacagtgtggagaactgggagtaattagttcattcgtcagtttgtccgacttctctttgtttcttgkagggggctggttccatagaaaaggatgggtctgtggagtaaatggtcatgagtagtgctagccacacacattctttaacacttctgaatgcagcaggccagctggtcattactgttactgccccctcatgggagaccaaatatagctatatcattcctcctccaaaactgccttctggcaaaagttatctcttttaagaattgtgtgcattcttaaattgcattaagggaagcaaacatatggaacaagaaagcacctcacttagttccatttgctaagcccttttgcagacccactgacccttccttaattccaaatgaaatctcaaatgctataaagaaacccgccaaatgggttacagcaaagacttttttacaccctactgttatgttcagaattggaaaaagctggggatttggcaaattccaaaatgttgggtcatatgaaaacttttttttttgagacagagtctcgctctgtcgcccaagctggagtgcagtgacgtaatcatggctcacttcagcctcgacctccttagttcaggtgatcctcctgcctccacctctggggtagctgggactacagataagcaccaccacacccaggtaattttaaaattttttgtaaagatggtgtttcaccatgttgcccaggctggccctgaactcctgggctcaagcagttcaccagccttggcttcctaaagtgctgggattataggcatgagccaccacacccagccccatacgaaaatttagtctcagaattagcctttgcatgcgtcacctgtaagttaatcagaatgttactttcaaaagttccmtgcaggtgaggaagctaaaaggtattcttgtatttttttaaatgaaacttcataatagaggtgtaaacagagtccattctccccagccttagaatcagacagcttgagtttaaaacccacttatgagcttgagcatactactgaacatagagtcacttgtctatgcctcagagtccccatggtcgaatggaaaatacagtgcctacttcaaagtgttattgtgaggattaaatgagataatatatgcaaagcacagcgcctggaacatggaaagtgctccagaagttttattgttattaacattattattattgccaccatcatcattaaacttggtaatttttactctccccaatcctttagttactttttcaaacttctagttttttgcttgggctccatctaattggctgtgagtcaaaagagaattcaccacatccaagtgttttctaaagaatgtctttggaaaattcacaactgatcattttgataccagcatctaaggttagggctaccttatccttcatcaccttcttgttttattcataacaccacgatgtggactattgataaaattatgtttcaaagataactagcttatttgaagccatctataatttcagcccaaactgactaattaggctaactttcagaaagttaagtaagtgtctaattctcagttaacttactacctactgagtaaaaatgtgctgccttttaaaatccacaactaacctccctactcaaggcaaaccccctagttctaatatttgaagtatttaatgaacaagcctttttgggggtcctcttgtagttaaaacatttatttttctcctttttttttttaactctgttttttgtctttctttttttttttttttttttttttttgagacagagtcatgctctgtcgcctagattggagtgcagtgacacgatcagtcactgtaaccttgaactcctggtctgaagcgatcctcccacgtgtgcctctaaagtgtcgggattacaggcatgagctactgtgctcagcctctactctgttttctaccttttatttgttgcaaaagcaacatgtttattttaacaaatactggtcttcctcatcttactcccctgagatttcaatgttaaaagttgatttgtgtgtttccacgtaagtctttataacaagcttctgctgacactccttggcccagctttccataaacacatccatccctacctattaggttgaactgtacaaaattgccatttttataggtccccactattctttaataccaagcctcaaatttagccagacactaaatgtcctgttttatatacacgccttattcattccttcttggttttgtttttgtggcttcacttttgctggatggcctccacccccaaccccagctctactctggctggacattttttaactctccttcaaaggtgtacatcctgcaacttcttaaattccctttacattcattgtctacatcacatagtctgattgcctatataatacaatttcgtgttttagtatttatatgctatttaatacagatgccacctgttttgctgcttttattttctctggttgcttgatgttctattaccttractagactttagtgctttctagaaaaggacaatgtgtagtatatctgtacttattcaagtgctgatctaaggacataggatgtaatgtaaaagtttattcaatgactatttcaaaatacaaagtctctctttgtataaagtcattcactaatactgacattggctgatacttcagactggagattctcggtaatattactttttcttgataattaattttgattatamgaggatttaatatcatggaaataaattatgcaaatgaactcagaccctaggttcacttcccagaacaaaccgtattctgagaatacttgtggtgccaaaatttagagtgaaaccccagactattaatgatgctcaagttactttactccaacacaataagtactcagtgatttgttacrgaaattcaattaagtcttctcaagtattttttttcttttcttttttttttttaattatactttaagttttagggtacatgtgcacattgtgcaggttagatacatatgtatacatgtgccatgctggtgcactgcacccactaactcgtcatctagcattaggtatatctcccagtgctatccctcccccctccccccaccccacaacagtccccagagtgtgatattccccttcctgtgtccatgtgatctcattgttcaattcccacctatgagtgagaatatgcggtgtttggttttttgttcttgcgatagtttactgagaatgatgatttccaatttcatccatgtccctacaaaggacatgaactcatcatttaagaaaaagtccaataaaatatcagtcactatttttagatcttcattctcaatgtttgtaaagctaatactaatattagattaatgtaattttatcaatattgataattacttagtatacattgtgaactttgttttttggatgtcatttaaagggttattttcatgagttcctaagaaataatttaggcctttaaggttatttaacccttcagtagaaaatagtttccttgtttaagaaaatgatctccatctagtggacaaatttttatattacagtatacaaagaaaaatattaaagcccctagaatatctcatatcaagcacttcctgacctattaataaatgttttggttttagtgctaatattatggcttaaaagttgtaagatttaaaaatatcataactatctaaatgacttaaggtatttagcaatatttgtttcaaaacttatagtggagtgttaagacttgcttgatttaattggaaaaattataattaaagaaaaaattactgatttatacaaatttggtgtttactcagttgaactgaaaaaaactaaaccaaaactcacacttctgtatctcttacatttctgttcatgcacaggaaggagggggtattttcttttttaaagtgtagcaataagaatatcttgatattaaagggaaataaacataaacatttctacaggcattcacattactaggtcctcctcatgctgaaaagctgccatgactatcttcttagaagagaaatctactttgccaaacccccactatttagaagtttttaatgtcttccagttgtgtactaaataccttcaaaaaccttcttaaatactactcttcatgaaaacttctcagatatcccagcctgagttagtcattcatcctttatttttgtatcttaatgcactcatattaagtgcttaataaatgcctatttaagcatatccaaggagagtttgccaaagatccctaatgtatgtctattgaatgattagagaccatcctccccttccagccttcctgggaattgacaaggtttcacatacatatgtgcctatcctattctggtgaaacagatgtcccctgtttgggtgccacatatatttgtggtttatataatcatgcagtagagctggaaggactttaggaacaatcgatgattcaatgcagttagctcagtgactggtcaattaacttttctaggacctggtatcctcgtctgtaaagtgagtctgttcgacttgacaatctctcattgtccttcctgaaccaaataaatatatctataaagagacacaattctaagaaaattttaagttggaaaaacatatttacagctgctcaagataatgagttttccctcttctgtttatttgatggattatttcggagccactgttatttgatcacagattcwaaagtgatccatgaaacatcttccaatcttagagtcataactctatttattaatgactccgataaagaaaataaaggaatgttttaaaatgagctagttaatagtttgaataaagattctaatggggaaaatattaatgacagcaaaacttgaattcacatgtttatttattctttcaacaagtttttctttaaaaccacacacctgctgggctatcataagctatcaccctcctctcctaagaacacatgaaagttgactttattttaatactggttgatgtttcactagaaaggttctttgtggaaagtttatctagattataaggactatgacgttaagaactgtgtgtgtagattttttcccagctctaaaatatgtattgctgagcacagtgccttttattcatttaatcatttactcaagacacttgggcacagttttcaatgtgccaagaatacgctgagtctccatttgtagagagctcacaatctaggaatggagaccgggtgaaaaacattttcaattcattgtaaattctgtcattagggagtgggaaagtgtcttgggagcgtagagaaagggcctttcataaagctctgatgtaccagggtagcctttcaggtgcaggctaagtctcaaggatgagtgacagttaggcaggggaaaggggatttgattatttaggggagcaggaggtgaggtggtgatggcctgtgagaaggagatagtgcctcaatatgagttgagcaagaagtacccaatagctgaggatggcaagttgaggctgggggcaactaattgcaattgagagcagatggttagactggcagtctggcaaagaaattttgacttcatcctgagagcaatggtaagttactgaagggttttaaactgaagaatgacactggaaaatggattcaagacactaatataaaggttgttataataatataggtgaaatttgatggagacctgaatttaaaatattggtagtagggatggaaggaagtgggtacaatagaaattaatgcttggatggatgttatagggyaggagtgtggagggagaagcccaggtttgggagaacagcattaggcacaaaatgggtatttgttgaatcgaattcaaatatttgatgaattactgtgtatttgttattttccgaaaggaattttgtacttagaagattatgttttgcagagtgtttcccttttaactgaagtagagtttggaaaaacctgtatcttgtatctggtcagttaacaacagtatccaggagaacaagaatgtgaagtcaatgtgtttttcttttatgtatttcaatattatcatatttttatggcagaaattagctgtaattttcattcctgctaattccactgtcagttcctcagctgacgctaaatgctttttgaaaatatgaacatgtgaatgttcacagcaacataattccttctccttcctttacagttttgatgtggacaatggcacatctgcgggacggagtcccttggatcccatgaccagcccaggatccgggctaattctccaagcaaattttgtccacagtcaacgacgggagtccttcctgtatcgatccgacagcgattatgacctctctccaaagtctatgtcccggaactcctccattgccagtgatatgtaagtacaagggcaggcaaagagagagaaaaccgagtaaatttatatctagagctgatgacataataaaactaatgacttttgttcaactgtatcactctcctccaatgtagaaagaatatgaataaaattatacaagctagaaatgaatggtagatttaacctgagtgcactgtcactcttgattaacacacacacacacacacacacacacacacacacacgcatgtatttattttcccagaaaatactttataggaaaactgagaattaaatttttaatggaaactaacacttaaatcattagcttatatttatgtagagcctgagttttagctacctaactacatggatattttctaatattttgaaaagctttcaactccattgaaaagtcctgtgataatagactgtatagcattttgaatatatttcaattaatgtatgtacagatgttagcactggtttgccagatcatttaagaaatctttgtgggactttgccaaaattaaaccaacttttaaggatcatgagaggcaagcacagaaaacattagacagacttgaatatcatttaagatatagtacagcttgaaaaacaatgaaaactgacaagcaggtttgcagatcctgtaccatcactagctcattttctcagtgcatttcattcttgtggtagtgtgcatgtttttctacataggtctttattctcactcaatacctatactatcattcgtggcacatctgcctctgtatagaatcgatcttcatctttctctcttggtctatacatttgtccaataacattcaccatcttttcatgacacccatctcaaaaactcataacaggctgcaatttatcttataagaattagtctgtatggaacccctgagtgtctagtgttattcttgccattctaacagagcatcagttgtattgcaataggtctacatggggttctagaaatgaaattatatttcactcatttttacaaactatggttgctattttagcagttgtattattgacgtctacccttcttcatctctaaacaactttctattcctagtggccctatttttacattatttttatctcacttccttagatttgaaattcatgacacttacttattcattcacacataatgagaatgcttcttgagcaaatatggtgtatttaaagctctgaatctgtggagcagtgaggtctggcattttagaccattgtaataaaatatggtgagcacaatccttgaggcatttatcatgtactgmaggaacagagagaggagatggagagttttccacccaagggaaagatacagaaaataccgggctaagggaacaacatttactaaatgtgaggcatggaaaattatggctgaactaaggaatgacaatctgcttgatgtgaatagcgaaacctggcaagagagaagaaaatttcaaatacagtctatgggacctgagagccacagaggtttttagctgagttttggcatgatcatattcttgtttttattgcatcttgattactctattgttgaatgattgcatagcgaagtcactacagggaagtatttcatgtcgaaattcacagaagtaaggcaggctaaatatgatgaagacctaagtcaagggagtgatggcagtggagcaaagagctggtttagatgcaagaggcttatagaatggttgtgtgtgtgtgtgtgtgtgtgtgtgtgtgtgtgtgtgtgtgtgtgaagtatgtatgtatgttgggggacagccagtggagaaggagartcaaagagagtgctgatttttgtccatgaatgagtacgtacatggtgatgtacgtacatggtgatgaggaacaaagggcagagagtagaaaacatgacagataacaggtgatgaattggtttgtacatgataaggctaggggaaacaagacaacagttaaagtactgggacagcaaacagaaataacagtccagaggaccaggagaaatagaacagttaccttctataattactaggtttttgaatgacagttgagtggtgcgttgtattcaggtaatagcattaggagcccctgggttaaggagtgaattgaaagtggaaatgtgagcaaatgcaggcatctctttaaaaggctgatgggtggagtaggaagaaagaactaaggctgcctgacagagaattaggttcaagcggaatttttttgaattcaggttacttgagctgagggaaggctccaggagatagaaagagactaaaaattcaaggggaaagagggtttaaagatggagctgtagttgctgacaaaaacatgatcatgagccaaagtaaggaggctatccttggaaaagtagtaaataccagaactgtattctttaggaaggacaaagaagacctgccttggcaacatagtgagaccttgtccttactaaaaatccaaaaaaatagctgggcatggtggcacatgcctttagtcccagctactctggagaggtaggaggattggttgagcctgggagttcagggttgcagtgagctacgatcatgccactgcagtccagcctgggtgacagaggaagacaagactgtgtctggaaaaaaagaaaaaaagaagaaggaggagaaggagaagaataagagagaagagaagaaggagaaggagaagaagagtaaaagaagggaaatgtaaatttagagatggaggagtaaaatgttaagagatattagccatgagttctctaaacattttactcctccatctccagatgaatgaatgtaaaagtagaaggtacagccatcaatagccagaggagagagggatggggcagcttgagaagaaagggaaaggcttaaaaaagccactatgcagatcaaaaaagggaacagggtaaaggtgagtagaatactgaccagccccatagataacaataaacaatgttaaataggcgaatgacagaattgaaagtcatctaatgcaacttcatcaaaggtgagtcaggcttggtattgacaaaagaaagaggaaaactcacagtgagttagtggagtccatttatgtagttatgtgttctacctttttaaattgtagtaaactgagtttgggatagattgtttctttcatacattctactccagttagtaaatattaaatatatacatatattttatgaaaagcttatagcatttcatatttaaatatgaaatgcttttatttcaaaatcaaacttgcaaggatacctcattttgctgtgtgcctcaagagttctttatctgatcagactcaggtaggaatgatgagtttaatcagaccatgagtcaacactatattttgctgaaaagtaatgtgtwgatatgtttagctttccattctccttggatatttacattggagcagtaagatattcctttgataccaactcctagaaagcattctttctaccaaggagattaagtttctgtggaaggaaaaggaaatagaataaataataactatttcaacatttaatctgacacgacacatatcttccaccataaaggactgtgccttctcttaatttgaattctcatatggccatgtgtaaactttaattttctcaccttacctagttcacaataatgctatgaagactgtctgatgtgtataattcaactgcgctttatagagaatgatgttatatatttaattacttgatgatttcttattaatagttctagttaagctttcctattgagaaattttcttagaaatttcaaatacaaacagtacctaatgaggataggtacctaatgaagggtatttaaaatgaaggtttgtggttatctatttaattgaactgttttggaaaacctttaaatactctttaagtttaaatataactatttactctattgggaaagtgagaagaaggaagataatcccttcctagtagataggatatcgtcatcttatcctctataaatagaaaccaatgaaatagctgaagaacaaaacagataaagatggtagtaataataatcataacatacatggtgtgtgtatatcatcaactttcccaagtattttcacaccagctatcttatttgatatactcacagtccttttgatagggacattgttatgccattttacaggttagaaagccaaagtccaatgagcttaatcttttgaaaaaaaagcaagcattttgattatttctaggagcacataatttgataatgccattgtaaacaaagtactttatactactacagcaaaaactgctgagaaacagaagtaattgttgaccaaattcattaaaccaatgaaatacatagcagtatcaaaatttgattaagaataaaataaaagctcaaggaggtacaaagtaaatatgcagccaactcttagagaatgtatacaagtatatagcactaggctaaattcagaatctaaaaaattagctcatataaggcagaagagaagttcctgaccacttctgctcagagaccgtcacacaatttgttaaatatagatgatgcagtagcaacttaattcttaagaaaagtaagaaaaagaaaaatgttaagtattagcatgagtctagtaaataaatacatgaaaataaacttgcattaccattaatagtaaaaattttttataacagtagaaacaactagataacaaaaggctggttgcccaagtggtgtcatgaagtaacatgaagaaaattacagcgtaaatagacaatatttttgtcatcttaatatttcagcatctgaataacaatcacttctgtgttttcacatcatccagtaatatagtatctgtatttggaaacacataaagttatgatacattgcaaagattaagaggagaattagcaatgacaagataagtagaattaagtcacaaaactatgaatttattaagtataagttacctgtcaaactacttaagttttaagaaatactcaattcacctggataactaatcctctattccccatcctctgttaaattaacaccaacacatagaatgcaaagatgatccaatcggctcttcactcacattcatatacattgcttctacacacagaatatggggtggggtgaatgcattcagagggccagtgacgaggaagtgagtagatttgatataccataaaaagctggggcatatttgggaatctagctaagttatccccaggcactatacagatatctcagacctcactgatcaggccttcggggtgccccattggggcattttctcagctagtagataatactctccctacctcccatgtcaaactactgtcctttctttagcaattaacaagtccctcaccacttcttgggcctctaatgtgtgttttcagtcacagccactcctctctactacttttgcctgctaagtataagagtagtattgcttccagtcctgagtttgaaaaaggaagaagaattccctttatgtcaatttgtatcttttattccagattattaatcttccctggtctcactaggaagaatataaataaaaagacacgttgcattacaaaggttctaattctcactggatctacatgaaaagtttgtagtcatctcttacctagattgcaagataatattacactaatgaacatttcaaaagcatatcaatttgttatcttgaaagctttcttccattaaccacagaaagaaagctaccatggccaaatcatctcttccccagttctgggtttttcccagctggggaggtatcctcacccctcaccctgtggtgtaggagtgatgggactagggccagagttctcaaaatgtgtcctgaggcaacagagggaatgtacatgggtgcaagcgttattttaaatgttcaagaaaaacacgaaaacatctgtcaaccacctggaaaactaatagcttggaatagttcccagtttccaattaagaccatgatattcctttctgtgacaccatatctttgcaaaattgggttttcagcagttgctggataaaaatgaagtgctgagcagaaatcaatgtgcaacaaaaaataagggaggcaatgtccaatctcattccaaaatgagaaattgacatagtgctcagtgggtgctaaattgttagaacaaaaccttattaagttatttggacttaactatttaataattggaactattatttattttggccaatgtgttgctgttattaaaaaattgagatattaagggcaccatgtactgagaaagtctgaaaatatttggattagttgtttattcatatctgaagaattagagctaaatcaggctaggcatggtggctcacatctgtaatcctggcaatttgggaggccaaggcaggcagatggcttgagctgaggagtttgagaccaacttgggcaacatggtgaaaccctgtctctacaaaaaatacaaaaatttgctgggcatggtggtgggcgcctgtagtctcagctacttgggaggctgaagcaggaggatcacttgaacccaggatgttgaggttgtagtgagccacgattgagccactgcactccagcctggatgacagagtgagaccctgcctcaagacaaaaaaaaatgattaaagataaatcagatctctatgtgagactatttgagagaattttgttaggagttaaaaaaataacagtttccaagctgtgaagtatctgatgtgctctagagtagagaatttatctttttcttaattctgttaggatcccaggtagccaaaatctttttttataaaatgtgatattattttggtaatgacctagatagaccaggctttttcttccattgctgtgtgctggccactgttactagtattattcggagtgttgatgcaggcattaatactagctattaaatctcaagaagtttattggcaaaatatgctaaggtcatctgctactagaatacctttttactatctttttgtttaaaaattctgctttatttggtgccatttattcaatcacttaagtcattttatttctgatttaaaaaaatgggagtttcatgaattgtaaaataagtcttataaattagctaaacawgtttcttcaatccttgaactgggggatttaaaatattagctgaataggcattttatattcctaatctcatactttcaaaaaaatcataaaaatgaaatcctgatgtttagacattttaaatggtaatgtttttaatgccacagtataaaaataaagcattgattttaatgcactgctacagtgagatggtgccagcacctctaagtatcattgccagtgctctaacctttaaaataacgaattaattgagttatatgtagtaatatatcttggctattactgccaaagtaatagatatatactgaagtcttaggagagatagagggataaatgttagtyataaaaagttgttaaagcagagggaaaaagaagtgaaaactgaccaaacatatacgtaattcattgtttctatgacaagcctgctgcaattcgaactctaggactttgtgctaatatttagcataccattttattttctagatttcctttatactcactatgttcctcagtatttgcactcacttcttttgtttgtttgttttgagatagagtctcactctgttgcgcaggttggagtgcagtggcacaatctcagctcactgcatcctccgcctcccaggttcaagcgattctcctgcctcagcctcctgagtagctgggattacaggtacctgccaccgtgcctggctgattgtgtttttttttttacttttagtagagatggggtttcaccatgttgaccaggctgggctcgaactcctgacctcaagtgatcctcccaccttggcctcccaaagtgctgggattacagactgaactcacttttaaatcttttaaatgtgaaaaaaaaaactctaaaaatcatgtgagtttttctcactcctgtataaaagagaaagagtgtgaaggtgaattatttaaacttataaataatgattatataattatgcttatacatcagatttaatacatttcaaaggataatatctactttctttaaaaaaaaatgcagggagaagtggtagtttaataacaagagcaattattccacaatcctatgagacactgaattcctgccagaagaaagtaaactcagaattggcctcagtcaaggaagattagcctatttttcagtgcataccaaaagaatgcaatctctaagagcacattatgtgtgaaataaactaaaataaggaaagtttgaagaacattttgaaagaaaaaaactagtccagtaacctggatagtgctctcaatgaaacacggcccctagatgaaggacccatagttgaaaattactgattcttcctgcctcttgaaattccaagaggcaaatggccattacaggagagatattggttcacccagttgtggatattgtacctagaggtacactagtgtactctcactttatctcaaccctcttccctctgtatattaaagaagactaaaatcaaaaccatgctccagtgtattgtaaaatagaaatattttgaactttaatttttttttcttttcttttgagacagagtctcactctattattgcccaggctggagtgcagcagtgtaatcacagctcactgcagccttgagctcttgggctcaagtgattctcccacctcagtctccctagtagcccaaacacaggggtatgctaccacacccggctaattttttttaatttttagcagaaatgaggtcttgctatgttgcccaggttggtctcgaattcctgagctcaagcaatactcctgctttggcttcccaaagtgctgaaattacaggcaagagccactatgcacagcctgaactttaagtcttgacggtggggcatatggtggcaggctgggaagaagaagaaagttgacttctattggagatgaccaatacgtgttttccaccacattctaaataaaggtgtgtattaattgatgtgcatttttgaatgagtatcactgttttactcgtttggaaaataacagtagcacctactccatgccagggtatcatttgaagacaccatagatccatgaaagtaagacaaaaaaattgtttggagcatgcattcttgtctttatttaatttttaaaaattcttgatacaaaaggagatgtttccagccaacactgagattcccatatgaatacttgttttcacttacacatcaatcattttaaatatttacttttgcttgtcagtcttagcttcttaatgaattgttctcaatgtctcctttactgttttctgagccatataaggaaaaacagtcacactgctggaacatttatgtgatgtgtttcttgagataagatattccagggagtattactaaatcatactgtctaagcccttgcaatatgaatcatctaaagatgtgcttctataaataaacagaaagaaagcatcaagcagacccatggtttttctttagaaaaccaagtaaggaatatcaaccactgggctttgctttcagattcctggtaatctgtggtatgattcacaccaggttcacagaggaaacaaccccaattattccgtctgcctactgcagcatctcctaggctttgtgtccacctacggttaattgccttgagactttatggtttttcctaaccttgggtcaagaaaaatttgctgacattgaatactggaaagttgtatctaaacatatataatgtgtcaattcctgcaaccctctctttaagacgcagggaacttcagagcagaaagaaaaagaataactgctcacccctcaacaaatgtggaaggttgtgatgtgacaagaaatcatttcaccagttcagtaaatgatgttgtctcccaataaatgtcatgaatgatcccaagtccaaaattttttaactcattgtttcactcccaagggagaacaaagctacatgcagatctcatatttccatgtttcaaaattcattttttctttggtgcttacagaacttcaaattgaatttgttataaccaccaagatcagttttgtttttgtggattggtgtgtgtgtgtgtgtgtgtgtgtgtgtgtgtgtgtgtgtgtgtgtttagctagtggatagcatattagacagcaccgagagtcttgcagaatattctgttgcagaaatagaatgttgcagaaatattctattggacagtgctgttctagagtctaaaacatttacttctatgtgccttcagaatagtctaaatccatttgagcatacagaaagcggcatggtaaaaacaaaacagtatttgaaggcctgggctcaaatccagctacactgaacatttccatgccttgggattttatgacccagtaaaatttctgggacactgacctagggttactaactccttattttgccaggtaaagaacattaacaaggaattacccatcaatatatatgttaattttattttttaaagacattttcacttcagtgaaaaagaaagagcataatctcagaataaaagaattttccaaaggaataygtatagtttaaaaaaaaaatctcactgcatggtccatgtacactctgactttgacaaggaccactgagcattctgttgggcaagtaccagatcttagagtggcatttggaaaccactgagttctgtcagcttgtcaagggcatgactgccaatgagtaacttaagttgtcagggcctagttccttatgttagaatgggaatatgagcatccatttaatgcagagttgtcaggattaaattcagcatgttggtagaacaccgtgtctggtgcctagtaggcattcataaaacacattgctctcctctctgtttgatcaagggcttccttttaatctattgaatcttttcaccacatgcagacctttaaaattgttgcactagttgaccaaaaatcttttccctaggatcccattctggtgaaaaaccaaaagggcagggccactggcattaagaacaagcctgccaataagataaactgtgaaagaagatcccgttcctagaacacaaagtgagagcacttgtgaatccctgcccatgtactcaactctttcgctgtctttcttccctccatggaagtcagactctcagctttgtactcaaaccttctggtgataatttgggacatcagccgtcctagaaaagtctctctattgtattggtttttrttaaacaaaataacctaatatgcttagtgaatatgtctacacacatgtgctaaacatttgtttaattatttaacttggaaaattttggtgtatcatttctaacagagatagtctttgtgccatcatataactaacaaatttgaaggcattcattggcatcatgtattttctctaatgagtcctaaattgttttctcatgacaaataaagagattccattttagactagattattttttgcttatgttgcrtaaacttcagtcccatctgctttatcatcagtgcctgtcctccacaagtgatatgagcacacatgagccaaaaattaaggatttttggttgaaagattttttttttttttttggtcaaagatggggccgggctctaattcttgttttaaatttatttttcatcaacaaataacaaattatatgcatttattatatacaaggtaatattttgatatatgtatacattgtggaatgattaaatcaagcaattaacaggtccatcacctaacaatttatcattttttgtgatgagtacatttaaaakctactctcagcaattttcaggtatactatgcatgattattaattatagtcaccagcctgtacagtagatctcttgaaattgtttctccttctaactgaaactttgtaccctttcaccaacatctcccattccacatcctcccattctcccccaggccctgctccagtccctgggaacaactgttctactctctgcttctataagtttgattttgtttttagattccacatatgtgtgagatcacatggtatttatctttcttgcctggcttatttcactaagcataatgtattctaggaacatccatattgtcataaatggaaggatatcccctttttaagcctgagtaggattctagtgtgtgtgtgtgtgtgtgtrtataacattttctttattcatctgttgttagacacttaagttgattccatattttggctattgtgattaatgctgcaccaaacatgggagtgcaggtatctctttgacatactgatttcattttctttggatatatacccagaagtagaattgctggatcatatggtagttttatccttaattttttgaagacccttcatactgttttccatagtgactgtactagtttacattcccaccaacagtgtaaaaaggcttccttttctccatgtcttcaccaacatttgttacctttttttgattaaaaaaaaactattataggtgtcaggtgatatctcatcatggttttaatttgcatttcacttaagattagtgatgttgagcacttttacatatacctgttgacctttttttgtaggtcttgttttgattttaatttttttgtagagaaggtgtctcacgatgttgcccaagctggtttcaaactcctgggcttaagctatcctgctacctcagcctcctaaggtgctgggattacaggtgtaagccactgtgtcaggccattgttttgagaaagacctattcaggttttttgcccattttaaaatcaggttatttgtttttttgccattgagttgtttcttaattcttaaaatattaataagatgtgagcaaacagtttaaatttcagaaaactaaatatctttgaaggtcactgtactagtctgttctcatgctgctgataaagacatatctgagactgggcaatttacaaaaggaagaggtttaactggactcagagttccacgtggctggggaggcctcacaatcatggtggaaggcgaggaggagcaattcacatcttatgtggatggcaacaggcaaagagagagagcttgagcaggggacctcctctttttaaaaaattagatctcataagactcattcactactatgagaacaacgcaggaaagaccagaccccctaattcagtcatctcccaccaggctcctctcaggacatgtggaagttgtcggagttaaaattcaagatgagaaccccatctcaaaaaaaaaaaattctaacctgctttaagaaataaaaatagtggtttgcacttgtaattccaactgcttgggaggctgaagtgagaggatcacttgagtccaggagcttgaggctgcagtcagctgtgaattgtgccactgcactctagcctgggcaacagagtgagaccccacatctctttaaaattttttcaaaatatttaaaatgatcaaaacgggcgaggcgctgtggatcatgcctgtaatcccagcactttgggaggccgaggcaggtggatcacgacgtcaggagatcgagaccatcctggctaacacggtgaaatcctgtctctactaaaaatacaaaaaaattagctgggcayggtggcaggcgcctgtagtcccagctactccagaggctgaggcaggagaatggcgtgaacccgggaggcggagcttgcagtgagccgagattgcagccactgcattccagcctgggcgacagagtgagactccatctcagaaaaaaaaaaaaaaaaaaaaatgatcaaaacaccagaaaagctgcatacacagatatacaaacaggtggcctgagtttggcgttgaaaagtttcaatttggaagatgttacctcacacaatactagacagctttaatgttactcatatattaatttacattttctttgattctcagtaaaaggttgctggacattcttgccaaattgaaagttttggtagttgtgatttttaatacaagtttttgtgttaaatagattattttaattctaagtggcaatagcttcaaagaggaaaagcacattcacttgtaactgaagttggctttattatattaggaactttattccctagggtttcataaatagatgtactgcttaatttattttgacttaaatggagctagtttcaaattaaaaggccaagcaatacagaggatccatatcctcaagtatgtctaataccaaggaaacagtttttatgtatttttggtattgttttatttactatatagattacttagagtttataaaaaaatctaatgcctcctttataagtaattttaaatcattcattatattcttaaatttataatttgtcagagtgaacattatttttggaaaaacaaatcatctcttttaaacgctatatggaaaaaataatttggttttgcaaaattttcttggtagtcacattttacagaatttttgttgtctgaaattagagtttcatgattttaatttaagcaggtagcaatataaaatacttaacattcccatgaattacctgtgcagcccagtttctcatgtagcattttaatatttacctttgtcttatgtatatttaattaaaataagcatgtttcctttaataagtagctttttaaaaatgaatgaatgataaatgaactgaaattcgtctgaaaaacccatatgattattttttaatttatttaaaaatagaatcaatgcttacattttaatacatttggattcacataacttgaaaaattttagagattaccgaatatagattggaatcattaacaatattttaaaagaataaaggcatgtataatttttatggttcattaatgtttaatgctaaaagcaagatatacagttgaatatacactatgactctaattctataaggaagtatgtagtccataatagtcacatactatattgcatacatgtgctcacatacatgcagtgggaaaatgttatcaatagttatctttgaatggttctttaagttgttctatatctcccaaagtatgtatatgtatgcatgtacttcatatgtgtgtatgtatatatatacatacacatatgtatgtatacgtgtatctatacatacacatatgtatgtatacgtgtatctatacatacacatatgtatgtatacgtgtatctgtacatacacgtgtatgtatacgtgtakctgtacatacacgtgtatgtatacgtgtagctgtacatacacgtgtatgtatacgtgtagctgtacatacacgtgtatgtatacgtgtagctgtacatacacgtgtatgtatacgtgtagctgtacatacacgtgtatgtatacgtgtagctgtacatacacgtgtatgtatacgtgtagctgtacatacacgtgtatgtatacgtgtagctgtacatacacgtgtatgtatacgtgtagctgtacatacacgtgtatgtatacgtgtagctgtacatacacgtgtatgtatacgtgtagctgtacatacacatatgtatgtatacttgtagctgtacatacacatatgtatgtatacgtgtagctgtacatacacatatgtatgtatacatacacgtgtatctatacatacacgtgtatgtatacatatatacatacacgtgtatacttatatatacatatacgtgtacatacatgtatgtctacatgcatgtatgtgtgtgcatacatgtatgtctacatacatgtatgtgtgcatacgtgtgtgtacatgcatgtgtgtacatacgtgtgtgtgcatgtatgtatatgtgcatgtatgtatgttgcatgcatgtatgcatgtgtatatatgtatgtatgtgcctgtatgtatacatgtatgtatatatgtatatatgtgcctgtgtgtatatatacatgcatatatgtatatatgtacatgtgtatatagatgtatgtatatatgtacatgtatgtatatatacatatacacatacacacacataaagatcaagtaggttacattatatgtttgttttatatgtccatacttctatgaagatgggtctagagagttgtgagtagacgtggtcctcctatagctaatccttgggtgttgtcaaatagtctaggctcccagaaatatttttatattcattttaaaattagaacatacttgtttctctataattctaaaagaagttgtcaagggtgaattgatagatggatgatagtttttaggctgaggaaagaaagatactaagatttcaaaattatcaaaatcttggactttaaaatatatttcaaaaatattattttaattttctatatgtttatcaatttcctaatcctattgacaaacttcagaggagaatatctttctagtaagagtgagtgaagcacagaagatgaaaaaagtttgcacaagattccattcggccagcgcggtggtgcacacctgtaatcctaggcaccccatagactgagacaggaagatcacttcagcccaggagttcaaggccagtctgggcaacatagcaaacctccatgccattgaaaaaaaaaaaaaaaggattagattcaaacgtaagccccagcctgtgactccttcacagtgctagttcatgcattcatttgtcatgctaaaatttgcaatgtgtgatattcaaaagcagtgggtcttacatggccactaatgctttaaatatagtaggattaggggtctttgctccataaagtaaaaactttcttctaattaactgtatctccttttccttatgatttcgtaatagtaaaacagataaagattgccacctagtgtgtttaagatttcaaccaatcatgaaatgaacttctataggaaattatattttcaggtgctgatgttggttgaacttatttttttaagatgacaacaggctttttcatttttaagtacttgaaccatatatggatctcaacaaagtcaccataagagtgtgggcatttggatttcttgcttttagtttcttgcttgtttctgtttccttattacagaaagaaaaagggtagaaaataacgtgataaataatacagaagtagaagaaggatgggagggggaatagagaatagaagttcctgactctactgtcatttctcttgtgagaaaaaaaaagacaatagtatactgttgagccctgtattctcctgctttcaacagcgctggctcaggactcagcaagtctttctctttgggagagacaaggctcgccaggactagtgaagatgactctggttcacttcctggtaaccagggaaggtgacagagcatgtggcacctccttggacatcatgaaatttaaaaccaatgtgacactgactcccacagtgacctacagtggctcatcctggctgttctagaagtttctgcacttgcattctgctgtgactgttaccttggtaccaatctcatctctcacatacatacatatgtgcatacatacatacatgtatacatgtgtgcatacatacatacatatagacacgcagtgtcaaaatgactttttttctgagccttcctatccctcattcattctccgcctgtcctccatgaacactccagttcttttttttaaaagagctgtattttccttaaaacagatcacagctgttttttgttaagggttgttgttgttataattgtttttatttaaatgaaagacagtattgcatcatcctcacccaaaattcacattaccaggcggtacaatttcaaaatgtccaggcgatattcactgtgtgactttgaatctagcttttcagtcactttatagagaccctaatagtctcttcccatctcagaagagactcagaaaaatatttagccaagtaggcctaggaagccccaatttattacattgtattgtaatccctcccagccccactttacgtggcaaggcgctttaaaaagcttctgtgggtaaagttgttcaggtgcaagatttcagaattattttatttcataggatttttttgagcatatgtgattattcagttcattaaaacccacacatactttaaaccaaatcatattcacaaagtgaatcttctgttgatcttaactaccagatctgtttttaaatgattataagcaaagtgtaagacacaattcaaagatatgtttgtattatatttattttcttctaaccacaaataaaaataggttttacttgccttattctcctagtgacagtatgtctgaaaagatctgttttaatattgagttgaggacttagacaaagattttaaaattatatgttaggtatatattcaaagataatttaagcatgacatacttttgaaaataaatggataggctataacctgccgtttatcgaggacatctgccactgaaatgctaggtatcattttactgttactaaaatgagaccatcttgagatatttggcagaaacaatttctgggcaatttattaaaaagtaatatatttccttcactaaaatgataactgtctttatgctttcatagggaaaaaaggctggtaaattatcataaatattgtaaagtgtattacttataatacttataaaggagatacaaccaaagagaaaattaaatgttttaataaatatgcaacccttttgagttttgaaagattcaaatccactgcaatctatataaaaaattaggagacatatttccatggattcatttcagattgatgatgtgccttgtcaagatgacttagtcctgaaaaaaataaactttatagtaggtcaattataaagaataaaatgaaagaagagactatagcttgggacaataagaagatgtcatattattttaattttggttatctgaactgcctctcatccattttacaatacaatgtcttcagcttggccatgcactgaagcagatgaatagtttatcagactggcaaatcaagtcggcataggtggcatgtcttttctccttgtgtaatatacctcccattatggaatttttaataacattttttaatgtcagaaaccattgaactatcttgaatgcaatatatgtagtatatacacctattgaaaatgttttttgtcttcggacttctaacacactacacagtttactgatttgtccaccactcccaagaatgtttggcttcaaatgaactctaaaggtgcctttatgtgtgtagaaatttgtcaaatgctgaagtgtttagctctggattttgtcttcatgctttttaaacactggtgtatctgtaaatatttctcagttgttttgtgagagttaggctactgtttcaaaataagtacataagagaaattgcagccctatatttacctatatgacacagccagaagggaaagtcagaatgatgggccaaggaagaaatgtagctggccaaccctggcatcactttgtaatttgcatttattgggccattttcctagagctttatttttaatctttttaagctgttccataggaatcagccaatgcatatcacaaaaggggaccattccaggtatggctgtgcagcttactacctgcgtgtctttgtgttaaatctcttaatcaatttgagctacaattttctcatctgaaaaatgggagtaatgtcacctaccttgcaacattgttgtaacagctgatgattgtatataaaatacacttgctgtgataacattctttttacttttgtaaatgcttgaaattttcatatctttttttccccagaactttttctttcccccagagcttttaatgctgtcatcgtccctctctctctctctctcaactaccactgatttagtttaggtcctcatctcttcttttctctacactggtctccctgcttccatttttgcccctttaaagccctcaatcttttatagacctgtcacagggtctcaagagtccttcttagcgaagtatcagttttctgagtctttgcaatttcctgactgcataggaaagcaaaaatcattatgatttaaaaggttttactactgctgctaattattattatagaaatgtttattgaacatttactgtgtggtaagcacatttttcagcacttaacattattaatttattgaatcccaaaacatcactctatgtatgtgctgttatctccattttacagatgaagaggccaagggaaagtgaagtttaataacttgcacaatttcacacacctagtatgtggcagagctgaaattccaacccaaacttccatcagagagtaaaatccaagttcttgtacatttcatacaagggctctgtgatctgctgcctggctcgttaccacccatgattctgaatttcctgccttccatggcattctctagaatcaccgagcttctcgttgcagctctgtatctgcttctttctcatctaggcagctgctctgcctccttggcttcatccctctctgctggctcccacgggctcaatggcctccttgccacttcagtgcaccaggcctgctcctaccctgggccattgttctaggaaagagcctttctgggcttgacctcagaagaccttttttttttgagagtcaaggtaaattatgtaaattatttattgatgacagaagaacactatcttagtccagtttctgttgctataacagaatagcatagacagggtaatttatatagaaaagaagtttatatcttacagttctagaggctgggtagttcaaggacatggcatcagcatctgattaggatatttgggatgcatcatcccaaacaatggaaaaatggaagggcaagtgagcacatgcaaaagagaaaacatgaggggctgggctcactttataacaacccactcttatgataactaaccccctcccaccataacagcattaattcattcatgagtgtgaagccctcctgacctaattacttctcacaggcccccacctcttaatactgttgcaatggcaattaaacatcaacatgggaaaatacctttttcaattgacatcctgcctctaccacttattagtttttagaccttatgccctctctgaacctcagttgcctcttctataaaatgatcataaaacccaatgtcctaccttcttagagttctagagttctatgaataatctctacaaagagcaggtgccccttgaaaaacatgattctggaactaagggggtgtaaaataacacatgcttcctttacattgttttttccttcttctgcttttatttcccacatttttattttcaagatctccacatggtttgatgacgaccacagcacctattctagctattggtaacaatttattgagtaacatcatccatatgctccctgtgccccagcatgtttcatgggtgttgttttgggtcactcaggttgttttcagattgttcatgagtgagcgaaaagtttatttgcactgttctcagggccatgtccagggagctgtctgtgttgaataacagcattcacttttgatttaagaattttatctagctagatcaagaaatagctgatggtgactctggaaatccttgtctcaaattattcatgctaagaaataccacaaaagaaccctgggccccagtttctcactttcctctaactggaatgttgcacaactttccttgcccttccctgtccctccaagacacgtcatgctgacaccttgctcccataccccaggcacggtgtagctggggttgctgcagcaacagcacacaaggagtaacatttcccagtgactacagtggctgggatgagtcagttgaacatttcactgggtttttattagtgtatgatgcagtcccatgtcatctacagttcctagcctgtccaagacttacacgggatgatgtggaacactccatgctaatcaccttcaaatattagatggtcaagggttctctcactgaagtcactgcattgctggttccttccacagcaccccttactaatatctacagtaagaggccaaaagtaaaactcaggccccactgctggaacaccatttctactattgcatatcctgtgtgcctaaaaagcaacagtgaccctggctgatgatcaagaagcccctctttttacccagggagttggacaattgttaacatcccagaagacatatttttaacccagttgctgggaagaacatgtgctgaagtataaggatggaatcactgtaattctctatgggaactcatgaaagtggaacttgccgtttaatattgaacgacactgagcacagagttattgatgatttctaatgcgggatttggtttatttttcagacacggagatgacttgattgtgactccatttgctcaggtaagcacagcttggtgaatgggcaggtttctcacagatgtaaaaatttaatttggggaattagttcgggttattaatttaatttaattttaaatcaagcacaagtacaaatacaaattcttggttcattcaagcaattcaaaagcaatgctagagaaagtgactttggctatattaatctgtttcctataaacccatagtaccaaagagtgtctttgcttcaaataataaattagctaagggatatacttaattgggctcatactgacataagcactagaagcagaaggctatatcatggcttaagttatgtttagtataattaggtacatgatcagtgcttgaaattcaatattccaattcaacccaataccttatttatctcttttttacatatgccatttgtgcagagatttagctgagtgatgtgttgatgtttacttcttccttctaggcatacaaatcatgaaaatactttaaccacatgacatatgtgcaagcaggtgataacatgatctaaaatgtttgggaatataaatatgaaagagttgatgaccagatgttctatgtatagaccaatacttctcaaccctacctgcacgttagattaacctagagacctcttatcccagtgcccaggctgcagccctggtcaattaaatccaaaaatttggagatctgttacaagcatctgtatttgttaaaggccttagtatttttctagtgtgcaggagaagttgagagtctctggtatagacaactaagggcggaatgagataaaactgatttaacctggggcatgaagcaggtttaaaaccaacactgatgagtaagaaatgttaaatattaaaatgcaagtaatcctgagaggttgtaaaaattataatcaggcctatatcatacatcaaggtgctcttgcaccttggacaactcacttaaattttctgggtcctcttttttttcaactggtagagttaggggactgagctggatgaaagacagtcagatctagttaaaaccctttcaccgcctcttgccaactcaatggacttgagcgagtcactgaacttttccaagcctggtctcttcctctgttaaataacagttccaagagtacccacctcataagattgctaagacactgaaataataccacgcttataaaatgctaggcacaattgcttgaaaatataatattataaaaactttgtgattggtttaaatgtatagagctgaaaatgttctttcatttctaaaatgtcataagtattattttttaaatggataatagggtttagatagtaggattatgtatagttctactttttaaaactttccaaacttttattactgtaacttagacctataatataatcaattcataagtaacataatgtataatagtaactttttaaattaatgcaggcaattaaaaataaaatacaatcaccatccttttcagatggttaatatcttgtttgctgaaggttttgctggagattatgaattctttctagtacctgtatttctgtgtccaaaaaatttacacttgtatgatttaataatatgatgtgatagcaaaatcttataaagctgagggtttttaattgattactattgaaaacttatggccgggtgcggtggctcgtacctgtaatcccagcactttgggaagctgaggtgggtggatcacctgaggtcaggagttcgagaccagcctggccaacttgatgaaaccctgtctctactaaaaatacaaaaaaattagccaggcatggtgacgggtgcctgtaatcccagctacttgggaggctgaggcaggataattgcttgaacccgggaggtggaggttgcagtgagccaagatcatgccactgcactccagcctgggtgacagagcaagactctgtcaagaaaaaaaaaggaaagaaagaaaacttataattctatatctaagacctcagagagaggtgaacagacaaaatatggcataacaatgtaagtaacatcatcaaacatagaaccaatcattccaatttgagttcattcaagtagctattcttgtttctaaccaaatgatctaggtattattataagaaaaaatatatataaatatttaataacaaatgaaaaaaggtctgtgtatgatatatggtcttttacatcaagtaatatttattaagctgcaacaaatagattagtaaattggacttgaaccctgccatcagtgctcttaaattccaaggaaatctagtcttttacctgattagatattttctgtagtgtacctataatctccaaggaaaaaaaactaatggaatttcaagatattgggaaatacacacatatatgtaatttagtccatgttagtaagctatttaaataaaaaagatgtgtacttaatatacttgaaattagaacttggaatataaatcagctgtataatttataggcatatctgatgcctaaaaataatcccatagtatattaagtctttgcttatgattagctaagtgactcataacaccttgtagagagtggtcattacttgagaggctgccgattttttttaaggggcttcatcatggttttcacaaatggccttttactggagtataagacctggaaagccccactagaattaaaaacaaaacaaaacaaaaaactgttaagccctgaagagtttcaccactcttcatagagcatctgtggggaggggttaagagagaagtcccagtgagtatgtttgagtggccttctcttaaaccctgttggacatgattggcatgttttgctgacccaatcactaacttctcaaattttctttaatacaaagtaaagcacttaccacttaatggtaagtgctattttagcattaactatttaaaactaaaaatataagatacttatgtcacttgaagtgataccaatctaatttgtcctgatataccataattgctttcaccaaaggacagaaaacaatggattttagaaaagtcactcagaaaaatatttagccaagtaggccaaagaattaccctcttttctcagcatgctttgaaaattggaatttcacactaaattccagtgaaaaagctatgcttctcaaaaagacaaaacaaaacaaaaactttttgcataaaagtttagaaaaataataagaaaaagaaaaggaaaattttctaaaattccaaaccccaaaataactgctactgacattttattttatatcccttcagatttatttttctgtgcatattttctgtcccatggctcctaaaaatggccttcccctgtctaaggtgttcaaagatcccctcccaaatccatctcatcttctgcctcttcttgagaactcatttctttatgcctgagtccatctccaaaacacgaatcatggtttccaaatcatggtttcctttgacgtgaaaagagcaaaatcctaaattagaggagaatttaggaagccgtgcaaagatagattgcacttttttggccaggctaaagcctgaaacatcttggatagtaattttcagaaaggatcctatagtatctctccatagtttatcccattgtctaaaacactgtcagggctagaaattcttgctggtgtttaacctaaactcttttccacctctgatttcttatgctttcccctgtaagctcagaatccctttggtcctcagaaaaagtgacagctttaaatatttttcttatttcaattgttaaagtattctcttgtgtttgtgttgaaatcttttggtgtgggtgtttccttagcacgaaggctagagaggaatcccactggagtgcacgcggcaactgacctttttttcttggccagagttcttgggggccaaggagcactaaggaggcacaatgctgataaactgtaggaaactcttctctgctgtcagctgcctccgggctcagtgatcccaggatttgtgacacaactaccctgtagtaaaactctaagttgactagaattttcatgtggaagtgtgtaatgttaaatgaagtagactctgatgaaagaaagagaaaacaggaaaacccaagcattatgctggatccctggagaaaccctcacttcattcagactaaggagatatccctgatttgaaaatacagaggcgggagaataacttgaacccaggaggcagaggttgcagtgagccgagatcgcgccattgcactccatcctgggcaacaagagcaaaactccgtctcaaaaaaaaaaaaacaaaaaaaacaaaaaaaaaaacggggtaggaacaactacatctctttacctttactctaaccaaaatacagcacctgggatacttctaggataaaaatgcagtagttattaatactatagaatattaccatttagttggtaataaaatataaccaatattctcatattcctgcctgtccctcagccacttcacccagcagcaacgatcttgtggcctcatcaccatcctcaagcttgcagactgtgctaggccctccctgccaggctatgaaagaagatagtcacctcgtttcagtcggtgctaaatttttagcttttctttagccttaattaatttaaattacaactactatcttctggacatctaagttctttttaagagcgaaccatataaaattgtctatcaaccttttctggtgtacaaaccagcaatttcatagggtttaaacaaaacataacctggaaagaggttttcttttcataaaaatgacctttctattttgtaaataagcataacttgactccagctttttccggaggtaaaaccgaagtaatgaatctctcccagtgcgggtcgccgcttcctccgccgccagtggcacctcaacctcatggtctgtgttttaccgccatctagtggtaacaagtgtatatggttatgaaaaacaatcctcgaaaccatttattttcctctttttttttaggctatgatgttcagctgtttaagtgttaaatgataaccgtattttcctgctattttcagtgattcttattgtttaataaatgtttagaagcacctaagaagatccgagagtagtgtacgtaaataacattgaatccttccccatgggctaatacatgaaccatctttgtctaaaatttttctgtaaaactaccagtatttccttcctaaggaatatatatttctcatcattcccaatgtaattttgacattgactggctatacttctgcttggtggggcagaagagaaagaaatgaccttaattttctaaccattgagctctgtggaagaaacgtcagggatctttttggttagcaagcattaaggagtaaggacaactgtaaaaggagccttaaagctttgactacagttcttaaagagtcgaattcaggggaagtgagggctgccctgaacaaaagcaaagaacaatggaactttaacttaggggcttcagtaaaactgtttatagttctccccacagcctgcagtaacagatgctccctctttgtgccctgcaatgcaaagtgaaagcttaaaagactaacacagtgataacagtgatgacgacaccaagagtcagtcagcgaggcccaagacaacacccccttataagatttgtctagaaatgttatttacacttctgccaatagcatacatgtcatactgtagaagataatagttaacaccaaacataaaatttataaaatagtttgtcctgctgcaaaagaaaaaaaaacccacacacacacaataaataatctaatactggcatgcctaggaaataatttctctacaagattatttattgcaacagtgtttgtacaaaaacaactttaagatagaaaacctaaaagttgattgctagtggccaggcagctgattgtctgaaggagagaccggaagacagattccttttttcactttttattttgaagtatttcatatatataagggaatatagcttgtaattatgtaaaatataaagaataatactaaaatgaacagtttaagaaatagaacagttatcagtattttaatgtcccctgagtgtccctccccaggttaatctgtttctattgcgtcttttcagaagtaataataattttgatttttatcttaatcattgaaggggagactttttgctttatactcttttgtttaaattctgaagcatgtgaagatataaattatacaaaaatacataaattttaaactaaaaacaaagacaaaataatattaaattagattacttattaaattagaagtttattataatagaggcaaaaactcctctacagaaattttttctttgatgaactaatttttcttttcatgactgatgtttcccttcaaatgatcatagaaaataagttgcctgcatttctatgtctatttacccagctgtcaactgcaatgaacttaactattatgtattggaataaaaatctcagaattctagggttaaaaattttgcctaggaaggggatcaattagctggtgcaatgattttatcttaaagtttccattagtatgtttgatattcacttcttaaaacataaattaagcctgcatgatttaacgacagtggatcatttatccgatttacttctgcatcattcaagatttcatgcctaatgaaagacatcgtggtctgatgtcagcagtcggccatttgaatactccatcataggcagcgtgacctttcagagccgtgggttgtttatatgagataatgagccaggtttttccagtgactgagttaatcacggttggcttcttaggaagcagcattaactcctttaggggaaaattctctaagtcactgtcccaaggcgtacacagctctccattgacttacacaaatgaatgtcaatttcataaacagcaacaacaaaacagagtctgggacatttttgtcttagaaaaaaaattagactgattttagtctaggtctgtgccagatgaaacatttctgaaaacaactctggaaactttgaagcaattaaaactttggagactcttgaattaccaatgctaggcattaagtaaatttcccaagtgcatgccaagtcattaagtcaaaggtaacgctgccatcatgggctaatattggctgaatgctttctatttgccaggcactgttcttggcaccaaacctgtcattccatatactcctcacaacaattctacgaggtaggtatcactatcccagttttccaggttaggaagctgaggtacaaagaggttgcatatctagtccaagttcacacatttactacataacagagccagacagtctgggttgttaggtaatacctactcagacatttggaatctgtgttttacataaacttagcactctagctgtcacccaaatcacctataatcccatctaatatgggtttgaccctggggaaacttgcccatttcaggagaaagagaggagggaagaaggagataaggctctaggaaccttctcctaggctcacttccagtccgttggctactttctagttccaactggaattagaaaaagcgactgttagagatagtgacacctattggtcctgccttgttatgtgtgtgggcatgttgtgtctatgtattcatttagtcaacaaatttttattgagtatcttctgtgtgccaagcattgtgcatgtacagggcgtagcattttacataagaaacgcatccctgagagcttcttacaatgcacaattcagataaccttaacaaaagaaaacaatgtctgcttactagctagagtagccatgtggcaaaggtagaaaaacagtttaaaattcacttcacttgccaacttattattatgagattcttcatcaatttttgaagagatttgggagtagggaattttttatccctaaagtgagctttattagcattttatattatactatttgaaatgtgcaaaaatgcaatcatgttatctgtgtattgcctggaatattgtcttggtgactaaggaacccagaaatactgtggaaactgctgctactgtcaccatgtgcatagacaatgtggagggatttctggaaaatttctgcagtctggcctctctggatttcgtgtggatacctacaaactgcactaagtgttgggagattctttagtggtatatgaaactaagttgcaagcaatatcaagttttctcttaacaaaccattttcaagtgtatttaaaatggccttagctcaagaagtttcaagaatcctttcttgttgtaggtcttggccagtctgcgaactgtacgaaacaactttgctgcattaactaatttgcaagatcgagcacctagcaagtaagatatccttttttcccccctcttttttgctgaacttttaaataagttttctcaacttgattgagcccaaggcaatatgttagacttctctgtgttgttgccatgttgtctgtgtatactaagtcatatgatgtcctgttaattttctataaatacttcgtggtgatggttctaatatcagaaatgaagcagtatgacaaataaatatggtgattccatctgtcagaaatcacctggcatgatcagtcctccgcccagttatttacactcagggtaactttatagtttcggcttacttcataaattaaccgtgggtgaataatctcatcacaccttaagatcagctgaaagtcatcctctcaagacaacgatgatttggagaagcgccatatcatagcaaagatctttgattctcctgctgttactgactttcagatcagcagcattcatggagcaattaatagaattgtggtttatatgacaacagggaaagcatttgaaagatgggaaaggattatcatttcaggttcttgataaaggcaaaaaaatctaaaaagataaaagtaatttttcaatattaaatggaaaactggtttgctgttatttcaatgtccatttttttaaaaaaaatctgctattaatatgaaataaaatattaaaatgccaacttcaaataattttccagaaggaaaaaaaacatttaaatcatattaagaggatagtaaatataagtgtattaggaactataacttacctaagtgcataacatttcatagtagttactacttcttaaaaacaatgagaaatctgaactttacatttcatagtaataaaattgacctcccagattcacgtttttcattatcaaaaatagctctggccgttattcaagtacttcttgtgatagaaaaaagtttttaaaaatcaatataaatgtaacaatgcaagctattggaatggaacccattaggttctgtttttccaggtaatgaatttttgcagtcctattctctcagcctgaatacttctcatcttcttcttcctctcctcatctactgggataattgtcattcattcttttggttgcagcttaaataaaatttctcttggagcattgtccctgatgatacccaacatagacacacacccacaagccctaatcaaagtgatgtgcctttccatctctgtctgattgtaccttgtacttgattcctatgttagcacgtagctctctgtgctcctgttgcctgtttgtctgttgggatgctcctgaacactgtcagttcccagtgagtaggaatgtagtcggttcacatttgtattccctgtgcctagcataatgcagagtctatcagtctgcaaaggcctgttcgctgaaagggcaaagtagtaactcagcatgtaaaatctgagggcatgctttgaggtacctgttcattaccaatcacgttttctatgtaacgtggccgtgcaatgtcatactgacctcagcggcccccttgggctttggggatttggtagcttgtaaggtcaatcacctcccccttagaaagtctcagctctgcagaagaaatgaagttaactggttgtcactcccaaactttttagtctcgaattttacccaggaaactgagatttttgtctttaaaaagtgaacaagaaactccctttatgcttcctttacatgtggtcacctgggtaccagcatttaaatctgtggcaggtaaatagttgatcagtcaggctccagagacgatctgaggcctgtttctatgcaagacagaagttttcagctgacatacagggatggaacagattgaaatggaaaggaggagctagaagaaaacagaaaatcatagcttgagcctgaacttcctctctgccttgtcaatgcccagggtgacatctaaccaaacagtattatctggcagactctaagtaaaggccactgtggtcttccttttggtcaatgcaaatttgtgcctccattactgattcaaaccaaatcggcttctttgggtatcagaatagtaggattcaatctattcacggctaaactcgattctgttcagtgagaacaaagtgctgtaactctgcctcatcacatgatgaccctgggagaatcagaacctttcctgctgggcactcacagagccactagaacatttccaagctcatccttggattttatggaaggcatgtgctcctttgcacaagccaccctttttatttgctgcagaaaaggagtctaggaagaatgcattccaaacccagcccctgggtgggtattcagatgcacattgctgacttgttaacacattactgcttcttgtcaccttgggttttttgtttttgttttgcccttgagattttttattccagaagtgagttctggctcatctgtcattagaggaggtatcgaggcaaccatggatcaaagtattaatattttctgcttgccattacttgttcagatatcaagttcctgagtaccagttaattgtaggattgatagtaaaaggagataattagaattgagtcaaccatttggttttccaaaactgtagaagagtgtgaaaatatttatttaataccattcccagacaaaatcaatggtttctaaattttcacagagcaaggactaaaaaggagtaatcaggatatcaattatttgaatgataaactcttagccagaaggtaacagataacaccctgttacacacagcaagaccccatctctaaaaaaaaaaaaattaattagccaagcatggtggcatgcacctgtagtcccagctacttgagaggctgaggtggtggggggaatcactagagctcaggagttctaggctgtagtgagctatgatcacaccactgcactccagcctgagcaacagagtgagaccctatctcaaaactttaaaaaaaaaaaaatttaagaagaagaagataattactggtatatagaccagagctatttcagagcagctgcttaaaatattaatattttggtttatcgagtttaaattctccccatttttcccccaaccattttattttataactaaaaaaaactaaaataattcagaagtaaaatttggtgcattttcaatcaaacacaaaattttaatcccaaatcgataccaataaccttaggagcaatgaaagggagccagaggctgagtggaaccagtgagaatttacaaaatcccaggctgctttccccaactttcccccaccctgctaagaaattcatcatctcagcaaggcatatttgaagagattgatgccattggcacatatgtgaggctgtgcatgcaggttccacaaaaacatctcaaactaaggcagcaaagcagagcatagaccctaggatcacattcgtttagttcaaatctcagcttcgttacttaaaacaagttcttcaaattctcaaagttttgtttttctcattggtaaaatgagaacaatgaaacttacttccttaaggcttattgtaaggattcaatgagataattcatttaaagtacttatttagcaatgtctgatccacaagaagtgtttattaagtgttcacccttggtagaggcaatatatatataattattatatacctaatatatatatatatatatatatatatatcagacatctttgaatgtatctaaaagtgttttttaatcattatattttaaaagctgtcagttacaagtaataactttataaagttatatttcaaaaatgttgatggatactttataaatgatattcttttcaacataatttattaagcactgacggaatactggatgcattgtgctaggctctgtagggaatataagttaatcagacagcatgctttttttttttacttcaaggggtttatagtcattttgtggaacttggcaaacatctgaaaacttagagaacacaagatataatttatttaagtacctttggcttagagtatttctaaagcttctatagtatctatttggacaagtcattaatatacctctctaacaaatatatcagaggtgtttttcaatataagaaaagaaaggaaaaagttcaaatagcttctctaattataagatagtttacaacaaatcattcacttctgataatgtacaggcaatcacgagaatttaggccaacaataaaaatttcttaaccctgtattagggaagacaattataaattgactgctttttcaaattcagagtctataagctctggcttcagcgaataaagtctgtaagaatttcctcttctctcatgtcccagtgacacttacatcagctttatttaccccaaatcaatcactgtgagatttaccagttttctttttggacatgtgtgatctgagccataatacaaagaacgcctagggacttgtctggctagtctgaaagaaatcatttgcgtgtccaaacttaaaaataattctttaaagtaaaatgctatatctgaaatgactcagagagtgatcaaatcaataagccccacatatttactgctttgtgtttttctgtctttgtcagaagatcacccatgtgcaaccaaccatccatcaacaaagccaccataacaggtaagaaagatctggagcttattcttcatgtgtctaggaagaaaccatttctgccaagagtcaatataacaccaacaccaatttcatgctgcaatttgaaaatgttaaagaaattctttcttctctacattatcatttctatcattgatctcacaaattgtctaagctgttatttggaacatttttaccgatttacgttttttactgatgtacattatttttaaccatttaactatgtgcttatactcatttgagcattgctctgggcatttgtattttgagagatgatgttactttcaagtcacttcccattctggttccacacatgtgttattagcatgatataatatgtcatcatttagtttaataagagtgaaggcataaataaaaggagtaacgtgttggttcatcaatatcccacttgtgtgtaggaagcaacattgtaccagtagtccaataaaggactgagagagctgagaataaactcagtttgggaggggagagaagttaatatacaatgcagaaaaagttcaatgagatcaaaacgttgggatctatagatgtttgggaaagaaaaataggaggaaagatgagaggagccaagtgcataaaaataaaattatctcaattcctattagtctgttttaggcacaggacttgaccccagctgaaccaaaaacagaatgcatgatctcattttgctgaacctgaaaccaaattgaactcttttgactatttcttgaaaccccaattgattcattaaaataattgcctggaaaagaaaacctatgttttctaaaattattaccagaagaaaattagcatattctccaaactaaaacaattcgtcattggattcaagtgtcttccttgagctccaacccataatgtgctgaggagctcttattaagttattagtgagtacactttgcttgaaatttaactttatcatgtccagacgtctgtctgtgtttgtggtcaccacattagagttgattctggaatcattgttaatgtcatcttttctgaatgtcatcaagtgaaacttgtatttcaatgaatgttaaattattgatctcttcttcatgtttctctttcaacatattattggtgatgacttccaattatcattttatagtacatatatggttaaccagttttgttcttgatattgatcaagagatgaacaatagggccaggagtggtggctcacgcttgtaatctcagcactttgggaggccaaggtgggtggatcacttgaggccaggagttcaagaccagcctggccaacatggcgaaaccccatctctactaaaaatacaaaacttagcatggtggcgagcacctgtaatccaagctactcgggaatctgaggcaggagaatcgcttgaacccaggaggcagaggttgcagtgagccgagatcgcgccactgcactccagcctgggcaacagagtaagactgtctccaaaaaataaagagaaagagagatgaacaataacaattcctatatgctaaaataaatactttgagtaactgatttcttctgccaaaattcaaattcaacataaatgagtctaaactgagttggaggtgtggaaccggatccctctgtttctatgcactttcctaagttgaggaatggacaggcctacatttatgaacctgtacctgaggcctctagtgagagaagccacatggaagctggtcttcacgctgctccaggcactaaatctgacccctatcaagaggaactaccctcaacccccaattttgcaataagcaagaactgacattgctatttgggcagaatgcagtgctattttggtccctggaagcttttttagcttgaggtcacatatgagctggcctcacaggtggagcagcattctcccagaagagcagcatcaggtaccagtggaaattgttgtggctgacaacagatggttgggtgctcagtggtcagggcagctgcccagccatcccagcagatgccaggcacagattaacaggagagagtagctacactcaaagggcacacacttgatcttaagcatatgtgacagacctcatagaagctcctagaaatgtatacatagtaagggggtcctggagcaataccagagggaattatgagccacagaaattaagaaattaaggtgaatatggcctcattcgtacccacaagctcctgacctgaggcctagggacaagggggacacagaaataccttatctagaaagggaaactaattaactgttgttaccacttagtgctgctgggctcctcacaaagcacaacaggaaatgaactgactaaaactgggaagtcgtttttcttgcccaagcatagcaaaccaaggtgggaacatggcatagggatggagggatgagggcagtagcaggggaaggttcccctttctgagcccattttgaaaaagtgggcccttaaaacctcagtgctagtaataataatgatggttgagattttgacattagtaagatttgagacactcagaaaaggcagtgcttgtgcctttcctccctctgcagctgaccactcaggccccaccctctaggctcactccccctgaagttggaacctggctgtactgtggcagtagtcctgggaagggcaaagaagtattaaaaagagtcagtgaggcacccttaagatgaatgggtccctgttgataggggtcagacctagtgcctggagcagcatgaggaccagcttccatgtggcttctctcactagaggccccaggtacaggttcgcaaatgtatgcctgtctatccctcaacataggaataaggtctagagtaacagtgtagcctaacagttaagttcatggctgatccaaaaggctgctagagcacacagctccaagtgcctccggagggcaactccacagaacatcacaacatggtgcccctagaattataccacgtggttgctctgcctacccagcactcaaatcatgctctatcatgagagctttgtggccctgggcaggttgcataccctttctctgctcagtttccctacctataaaatagtgacactgcttcctgcagttgttgctggcttgaatgagtgaacacgcatgatgcccttagcatagtgcctcacagaaccagcacttaatacatctttttaaattccattttgttgttattacttggttttgtttctagggcccactgtatacatagaactaggggtttcttcatcaattcaggctgccataacaaagtaccatagactgggtggcttatagacaacacaaatttatttctcacaattctggaggctggaagtctgagatcaggatgccagcatggttggggtctggtgagagtcttcttctaggttgcatcagtgccctttgtaaaggcactagtctcatttgtgagtgttgagtgctccaccctcacgacctaatcacctcccacaggcccggcctccaaataccaacacatattgggttaggatattgaaatgaattttaggggcacacaagcactcattccgtaacaagggggtaatggaaagaataggacaaagacacaaacgaaggaaagggaacagtgagagaaaggcaagcttgcaagatcatgagaggaaaacttgtgggtccttaaattggccaaaatggatgcgcttgctttgtgcccatcaaaatggggtctcctcctgctcccagcactgtctcctttattctcatcacaattcacagacgctggtagctttgtgatagagatgatacactgttgttcaggatgaatttctaagtctaagaactcacttttgagtcatagttgtttgaaggagaaatattaattctctatcacttttctgtaaaccaactctaatttttaaaaaagaagagttaagaacttcagcagtctacatatcacataccatgctttctaaggagttgtcacatagaatttacaataccctcttcctcttttcaaggttattgcatttgacatgtattaaagccaggagaatttgatttttttttttttttcttgagatagagttttgctcttatcgcccaggctggagtgcagtggcgcgatctgaggctcactgcaacctccgcctcctgggttcaagcaattctcctgcctcagcctcccaagtagctgggattacagatgcccaccaccacgcccggctaactttttgtgtttttagtagagacagggtttcactgtgttagccaggatggtcttgaactcctgacctcaggtgatccacccaccttggcctcccaaaatgctgggattacaggcatgagccaccacacctggccgagagtttgattttatagcattagggttttaaagctaggttttaaaggtaggtcactggccagtttttatttcaatatatagtaggtaaacatacaggtctaaaatgatctaacaattccttaaaagtaaggctttgaagtttgcatttataaaagagacttaaatagctcttttgctctttagtgtgatatgacaaagatgatgtgtggcatttggagcctgaatgtgaacccagtctctcctttttgcttcatttcctcattttggagatttgagtacctaacacttaggactgttgcaagaattcaaggagataagttatataaaaggatagagttcaagttgggcatggtggcacacccctataatcccggatattcaggagaccaaggtgggaggactgcttgagatcaggaattcaagaccagcctgggcaatgtaatgagacctgtctcataaagtaaaaaaaaaaaaaaaaaaaaaaaaatggagccgggcatggtggctcatgcctgtaatcccagcactttgggagcccaaggcgggtggatcaccaggtcaggagttcaagaccagcctggccaagatggtgaaaccccgtctctattaaaatacaaaaattagccaggcgtggtggcaggtgcctgtaatcccagctactcgggaggctgagacaggaaatcgcttgaactctgagggcggaggttgcagtgagccgagatcaggccactgctcttcggcctgggtgacagagtgagacaccgtctcaaaaaaaaaaaaaaaaaaaaaaaaaaaagaaagaaaaatggatagagttccgaatgtgatgaggaactcaccaagtgtttcttcctataaccctgtcccaatgcctgacatttttttgttcctaaagctaatttaaaaactggtagaatagaggtaacagagaatattggtatgtcagcttctttggtacatttcatttatgattttgttttcacacagtcatggcatgacatttttagtaatccttttatcatttagagtaaggctcacctacatacgtccttaatgtgtggtgcacaccagaagtaaagagtgcattggaacatgagagggtggcaaagagtcagagatgcccaagccatacctgcactgggacagtgatcccatttttgaagtacagccatgtagcttggagcacagtccttccttgtaagcatttcattttcgaacaaccttagctcaaggcaagcattctgcagccatctcattaaatgttacatcttcacaataccattttcaatgcttctgaatttccatatttccaatatgtttatttaatcatcctcaattagaggattttcatgcaaggacacaactctaaagaaaacgtatttaaatatctttattttaaagatgaaaaaactgagacctagtgagagagggtgctgcttagtgacaatgccaggaataaacatgtggttcctttttcgagtccatggtccttcttacacctttataaagtaaaataaaccattagattcgggtggcctttatacccaccgtggaagtatatgctttagagaaagtaaatgaagtattaatactaactcctgagtaatagatgtggcattgtattatttgtatatgagcttgaaaatttctcatcccaacctctcactggacatatctctgtagttatagctattttgattatatctactgcttataccccagaggcatagagaccagcaccctaaagcaaaagacttctggattttgactttggaaaatacaaattcttctacaggagcggtgaaactagtacagctgcctgctctttacctgtagggggagacacatgatgcagtgacaagcatagaacagcacagaagtggttttagtccagaaaataaataaataagtaaattggtctaagtcttcattcctttttgtatttttttaccctgaagattcatggcttcattaaaaacagtaagtgcattctaaatagaatttagtcaattggcacgtagaaaattaaaaagtaaactatccaaataatgctagtctgtcaaaacacaatgagaagaaatttaatcttatatgtttgttgttctaaagcacaagcagtttctaagaattaataagggggaaaaacaataatgatatttaattgggacaattatttttttgttatctgggctaatcacttaatgctttgagcttatcgaatgaaagaaactaagcaactatttcatggtgacaataaggatgctggctacttacttagatctgccttttaaatctgtgtgtgtgtgataaaagcaagtagtatatatagttttttaaaaagaaatatagagagatctaatagatgggagcaagaaccatataaagaaggcaaaagggatctacatgagagaaatatgtaagtcctcaggagatactgaagtaaaacatgtgttgtgtcagtgtatagggaagacaagagacccagccattgccagagaagccctacttcctcatcaaccaccagcaggcagcagcttcatgctgtagttctttttttcctttaatagaataaagattgtggccacactttaataattgccagaaatatgtgttcattaagctttttaagaaatgtgatcgaaaaatgctgatgatacattgtgtttaatagctttaataaaaaactgataaagcatctaatacatctaatgactgtcggatttcctaaatcttttaagctgaaggagtttacttttacaaaaatcctcattgaaaaagaatcttccggtaaaaacattgaactgaaagatttgcataaatgcatggagtattactatttattagttaaacttatgatcttttagagcagtaaaagtcagttctctttcttacaaatgaatttgttttggccttttatgcttttatttaatgagtagagccatacctattaatatataaaaagatcagatctgacaccgtggctttttgaccaggaattgattgaagttagacttgttttaagaatagtgaaaacaagggctatgtcctaattatgaggggaaataatttaattgtgtctctcttgtctgaatatctgatttggatgctttgttataactttaattgaaataattaaatggggctcatgttcatttagcctagcaaaaaggtgatgagctagcatatatgttaaaaacccagctttcctcttagtagttgtctaattttggtcaatgtacttaaattctccaagttttgggggtattctttatcagtaaattctaattcagtgcttaacatagtacttggtactcagaatgtattcaacaaatgttacttatcattattgctataatattattattattattatctgcttggtcaacagtattttccatgcaccttatatatggcatgcatacgctctggaggtaaaatgtgactactggttcaagaaatttacaaagtaagggagaaggaattataaatagttaagtactagctaaatgccatgattgaagcctttatattttttattttaattaattaattaatttttagaaatagggcctcactctgttgcccaggctggagtgaagtggtacgatcttgtctcattgcaacctccgcctcccagtctccagcaatcctcccacctcagcctcctgagtagctgggactacaggcatgcaccaccacgtgtgcataattttttattttattttttgtattttttgtagaggcggcgttttgccgtgttgcccaggctgatctggaactcctaggctcaagcaatctgcccaccttggcctcccaaagtgctgggattataggcatgagccacagagcctggactgaaacctctttaaatatatatatttatataaatatatattatatatatatatacaaaatatataatatataatatattatatattatatattttataaaattatatatatttcttatataaatatatatttcttataaattgtataaatatatatttattatatattatatacatatttattatatatttattatatattatatacatatttattatatatgtattatatattatatacatatattatataaatatatataatattatatatttattatataaatatataatatataaatataattctcatataaataaatataactatttattatataatgtatttctcatatatatgcttattatataataaatatatttctcatataaatatatatgtttattataaaataaatatataaaatatatattaaataattatattatatatttaatatataatatatatgaatatgtattcatatatagagagagagagagccagtggctctacctaggaaatgctccctgataaatttgaagaacataatgctttccatgtggttaggggaggattgaggattacctcacaacaaaagaccagcaagaataaggtatggaagcatggaatgcctgtccatatcaggggactgggaacagtaaaggacaaattgagttaaaggtgtataggagcaactgaacaggatgctccagaggtagattaaggaaataatatttgaggcctacataaataacagtggactttattttatggacagtggaaaatcattgagcatttccaatcgtaggaacaaatacacatttcagaatgacagtaattggaagcagtgtagaaagagattgaaaagaagaaagactaggggcagccccatactcttcagggggctgtcacaggccttgtacaggatcaagataatgcagctctgaactggggtggaagtggggctgtggagatgagggaatgggttcacaactcttcagagataggattgaagggacttgggggttgattagagcagagactgaggatgaacaattttaaagtgaaagtatgagccaggtgtggtggctcacgcctgtaatcccagcagtttgggaggctgaggcgggtggatcacctgaggtcaggagttcaagaccagcctggccaacatggtgaaaccccatctctactaaaaatacaaaaattagccaggcgtggtggcacgtgcttgtaatcccagctactctggaggctgaggcaggagaattgcttgaacccaggaggcagaggttacagtgagccgagatggcaccattgcactctagcctgggcaacaagagagaaacttcatctcaaaaaaaaaaaaaaaaagtgaaagtatatatacacatgttcattacagcactgtgaatgtgcataaagggttaaaaacaatccaaattctaaataatgtgtgaattctatttaggtaggggttaaaaaattcccataataaaatgattttaaataatttatttttgagaaaattttaataatatggaaaaatgtttgtattttaaggaatacataataaagtgccatgtgggcaataggcacacatttaatgcactttaattatgtatattgaattgaacttaagttacttttagttgttgaccagtagttagcaaaggtagataggtttaccattttacattgaatctagtgacaaacatgttatttctcaggtcccagttgttagtttgcctctccttgcctagaaagggcactggtgagacccgccctaacaatatttcaatattatggttccacagtccagcattaactgtattttaaaataataatatctctcacatagggcagcattttatggattattgagcctatgacaaaaatgttgtattatccttcagatgatcagaaaaactacccttagggctgggtgcagtggctcacacctgtaattccagcactttgggaggcaagggaggaagatggcttgaggccaggagtttgaggcaagcctgaaacacagtgagacctccatctctacaaaaaattttaaaaattagctagacatggtggtgcacacctgtaatcccagctattcaggaggatcatttatgcccaggaagttgatgctgcagtgaaccatgatcatgccactgcactctagcctgggctacagagcaaaactctgtctcagagtaagaaaagctaccacatgaataaaagatctcagtgtcaccaaagtccactcctgccagcatcccttccccgctgccctgagtttaaaaagagcaatacttcccaaacctgtctctgatcaaaggaatccccaagggcttcctgagaacaaccacaaaatgactgattcccagactttccagaactgaatgtctaggataaggctcaggatctaaattattaacaaatactcccaggtgaatgggcttgattggccaaatttgggagaataatggaatactgaagaaagcaggtgagagggctgcctgtgtacagtgttgtcattgagttgatgatagcttgttggaaaatacctgtctttctggaaagtatatatagtgacacccacaccctcatctaacaaacagtgcagcccaggataagcacgatcatatgtgcaaagtgctccacgattagtgaaagaagatacaaggtgatattattatctgtgctgacttcgtcatcctgggcatcagcgtcagggtcatcatctgttatctctcaaaatacatacaagattttaagtagagcagcttgctcgtctctgagaagaaaatcaagtatcacatctacctttgtggatgtgggagggagggaatttgggaaatgtttagtaattgcattctttttgtcttcttggacacagtaccaagtctccttaaactaataaaagaaaaaaaaaaaataaaagaaccacacaaactgcattcttcagtcactccctttctccacaaagtgcttcccacccatttcagccttaaaaaatattctaggcatactcagaaatacagtgactgtggtggggcaaaatgttgaaaattcctttgaggctcatttcccaaattttactagttggatgttacactgaattatttaactctaaataaatagggagtgcactcacagcgtcgtttcttttgttatatcaaaaagcctctctcaaaaaatgctttaaaaatcagttggatatattattaatactaatattaataaaagttaacatttactgacatttgaaatgtaccaaacactctagatgagtaatctttttaaaccttatgatatccaaagaggtagacaccgttgctattcctgcttcatagatgcaaaactgggctagacaagttgaataatttgattaagatacataggtagaaaattacaaagtacggattgactcagagggagaatgtcaagtcctctcctaaaatgtactggcatgtacacacatacacaagctgctggatgtgctggtcctcaaaagttattccctagggacatctctcttcttttttttctctctccttccctccctctctctctctctttctttttcttttttcttttgagaacagaaaacaaatctataccatctattcctgaatgtatatgagtggagggtaggacaagaggagggatmagatctgtggatgcacagaaactctttgggaaaccctaaaaactctctatagttatataagctaaggaaaggattcctgccagggggtataggattcttcaattcccacacttctcttcctgactcttctgaagtgcccgttgtcaccagagtgcccaggggcagagcattgacaaggaaaggcccaggtgtgtgtgagaagtcaggcagatggggtgtttcggaggaaccagggtaacgcagtgcttcagcgttagcactcaccttgcttctgggaccacttaccacgaaggcctgaaagggcaggccccaactactgggaatattaatcttctctttgggtgaagtctcttcatgccattatcatctcttagctaccattgctaggcaaaagtttcctagctcaccatgtcctgaatgcacttccttgagatatttctgatgcttaaatatccagtgctttctagtgtgccgtcttccttctgtatttttgttttgttttgttttgtttttttgtggttccttttcagcactgttggtcctgtggaagtatttctaattgactgtattctatatgccacacaaaacagatgggtgtttatgacattcttttctggatatgtttctgatgtttgcatattgaacacagaactgtccacatagagaacttgatttctgcctcttcctggctttgcttttactcatttagtccctagtatgtgaaaggctatgcttaggctccaaggacccaaggatgaataaaatacctccagtaagcttcaggaccattactctagaggtttgtggaacttaaaaagctaaaatgtgttctgttgaatgacaaaaagcattaagttaatagaaaacagagggcttataagtgaatggataaatgaataagtaaaataaagaagagagaaaggaagggagagaggaagaatggagcagatgcaggtgagattgtttttctaaagagctaagaagctgcctacagtgttagcttagagactgaaaatggtttgggaaaataattcagaaatttagggaatacttcacagcatgagaaagtggagggctgagattggtaaaagaagacatgtttcaaaatagccaaaaggaaaatagaaaagaactggtcgtgaaaccgagacctcagagttgaatgacaagtaagatacctctgaagtcactgacagtggactgactgttatttgactaatattgcttctacagagacagacctaggttttatcctcccatagaaaaaaatctcaaacattggtaggttttgtttttgtgttttgacatacaagtcaaaatctatgtgaaggaggaggaacaagactcaggggtcagaaaattggggtttcgtggctggctgtcctgctcacccactttacgtgtgaccttagaaaagtcacgccgatgtgttagatcttttctgttaaaatgtggtgggtaataattataccttcctaattttgaggaattacatgagataatctgtgtaaaaaaattagcacggtgtctgggacatagtaaatgtcaggtcttatttaaaagcatgtggaaagtgcttaatatgttgaaaagtattataaactaccaataaatattattatattattcaattactgttgatcctcaaaacagccatctctggaaactgtgcaattatttgagccctgatgccattgctgaaagcattttggaagtggctttagagaccatttacagaccatataagacacacacataccaaaaagcaataagcaatctcactggtttatagtaacacttcacttatgaccaaaaatattatttccaatatgattaccaaccctattcaccagacagaatgtcaaattagcttagatggggctaactccagaaatgaaaccattctcaagggattttaaagagttttttaagaagtatcacatggacttttaaggcaattccaagacagggagccctaaaatcattacaatgatggcaatgtgtggaataagcatataaacacattttcccagatgcaactttgaaggagacaaaatctgaattctaggcagtttgtgaaggaaaaggagcaatttctgggaaatttcttttacccctcagccaacctcaagacagtctgtctttctacagaccctcccttgctgtttctctttactggaaactgttgagggtactggaaataaaggagaaggccaatgtatctaagaccagtggatcagagaggagcccaagaaccttcatcatttccacagaaagggcagcagaggaaattaacctggccttttgtcatgctattatttctcagtgagtctattaaattattgtggcacactaaacagtgttgtctgcatcttgttctttggggattccatacaattctccccttggctggcttatcacctccccttagaaaatggtgtctcagcaatgatcctttgcttgcaatacaaaaaaaccaactctgctcattaatgcaaaattcttagtggaagaatataggaagaattctgaattccctgagaattagtggggcgacaggtggtggtgggggtgctggaggacgaggtttgaaggaatcagtgcatctttacagtgctagaaggctacaaatcaaggggaaagtctcatggcaggagtagtcgagtgagatccccacaactgttcttagtttctttgtcattatttcaagagtcaaacagcagtgaagggatctaatttgtcttgtttgcgtcctgggccttggctaaaagagaacaggcaggtggcttcagttctaccaaactatgttataaaatgtggtagtaagagctgaatgatgggaccagattttgtgggttcatattctagcactacgacttacagatgcttgtgctcaaacaattcatttaaccttccagagcctgaaattcctcacttttgaagtaagcacaataataatatttatctcatagggagttcatgaaaattatttgaggagatatttatgaaaggctgggcatggtttgctcacgcctgtaattccagcatttkgggaggctgaggcgggcagatcacctgaggtcaggagtttgagaccagcctggccaacatggtgaaaccctgtctctactaaaaacacaaaaaaattagccagacatggtgttgcacacctgtaatcccagctccttgggaggctgaggtaggagaatcacttgaacctgggaggcagaggttgcagtaagctgagatcgtgccactgcactccagcctggataacagaggaagactctgtcttaggaaaaaaaaagatatttatgaaaaatgaagcaaaatgcatggctcacagtaagcacttgatcattgctggttaactattattaagattatctaatagggatacaaagtatattcctgaaagaaattagggtgctcttagataggggaaataaatgctagtaggattggtttcaatgcactatttattttattaatttatttctcactgaatttctttttatgatactcattttttttagagatccagatggtacctgtcattaatgtatccctgagaactcagttcctctgaaggcacaaaaataatttgaccatctcatcatttgatccacacacatttattgatgcctcttttatgcttggttctatacaagacgccgtgacgtgtggcccctgtaggaagtcctggcctctgtctctaaatctgtcatctcagcccaacccctattcagattatctgtgccctctgcgtagccattcacttcgcctgggtgcaatcatgccttccttacccaacgtttaacaagtccagcctagcaacctacatcatgccatccaacagaaggaaggcattattgactcagaacaaagtataggcgctcttagaataagtttattaaatcatttttttaaaaaaaagatatgtgctttttcccaggggagcagtgaggcattgtcagagggtggattcattaaatcaatacagagaatcctggctgcactatttgttagctatttgactttgggaaagttattctctgagccttgatttctcattagaagacgggaataatagcaaacctatctcagagcattaagtaagaattaaatgaagtgaattaagcacgaaacctagcatctgacgcatagtaggaactaaaaaagaaatactagttcttgaataaacatttttttcttgactgtactgtgatacttccatcagtgagtttccaaggcaaatgaatcatctttagaattggaagctcaatgtaagcaacaatgaagtaaagaaaacaactgaatttctcttgaaattattttcctttactgacttgtctttattgtctgtgttcacaagaaactagctctgactgcaaaaatgtctgcctgtttctatggccagttcttttctacatgtttaaattcctaattgtgcacacaatcttagtcacaatattttcatgtgcaagcaattaagactcatttaacagccctccctctggaaggttttgttctccatctgccacaaatcagattccttaggaagatatttgattttgaaacaatgttaaagtactgttcattttgttcaaatttcatttatgtaccattttttaaagtgatgtaaatggacagccacaaaaagctcagcagctggtcaaaacaaaacatcaaagtcaccattgaaatggggcaaaaaaattaaaaactaatatgctgggacaatgccaaataaaaacgatagtctgataaacattcctcagacacattttgctcataacaactatttcctttacagcagatttaaaatatgggaaaataggaatataccccagttgccactctgaatcttagctgtcctgagttcactgcaatgtatataataaggaagtcagaaggtggaaaagaggaaaagattaaatttgtaagttttttgaaagatatatggtaaaaagtagaggtatccaacagatttgtacgatagattgttcatttaaggaccaggagcggtggctcacgcctgttatccagcattttgggaggccaaggaggggcggatcacctgaggtcaggagttcgagaccagcctggccaacatggagaaaccccgtctctattaaaaatacaaaattagccaggcgtggtggcacatgcctgtaatcccggctactcgggagactgaggcaggagaatcgcttgaacctgggaggcagaggttgtggtgagctgagatcgcgccattgcacttcagcctaggcaaaaagtgaaactgtctcaaaaaaaaaaaaaaaaagattgttcatttaaaaatcaattcgattggccaggcacggtggctcacacctgtaatcccacagcactttgggtggccgaggcaggcggatcgattgaggccaggagttcaagatcagcctgggcaacatggtgaaacccccgtctctactgaaaaaaaaaaaaaaaagtagccaggcatggaggcatggtggcacatgcctgtaatcccagctacttgggaagctgaggcacgaaaatggcttgaacccgggaggcagaggtgagatcatgccactgtactccaacctgggtgacagagcaagactctgcctcgaagaaaaaaaaaaaatcaattagataagtgagagtgtatattcagggcaacttaaatctatgctctcagattaaaaataagatttaattacaattttttttttttttgatgcagggtctcactttttgctcaggctagattgcggtggcacaatcacagctcactgcagcctcgacctcctgggctcaagcaatcctcccacctcatcctcctgtctacctgggactacaggcacatagcactgcaccaccatacctggctaatttttaatttttttttttttttttagagacaggatctcacgatgttgcccaggctagtcttgcactcctgggctcaagtgattctcctgccttggcctcccaaagtgctgggattacaggtgtgggccatcacacccagccaattttgaagtatttaatttttaaaatgaaaaattgattagataatagttctccctcactacaggtgaagtctgtttttatttatttgttcaatgggcttctttagaacatgacatagaaggcaatccttggtcaaattaaggcagaaacaagaatttattaggttctgaacataaataactgtctgtgaactggtaactctctaattaagcataaatgtgaaaagaagaggattagctcttcttgaggagttggaaatggaaaatattacaatttggagaggtagcttgcagaaaccgtacagttttctctgcttatatgccccagcgttgggagacttgaaaggaatcaccaaccaagttaatgcaataaatttccatatatagatcaattggatgttttgtccccagcttcctaggcctttaataaactgaattgttttggtatcactggatgaaaggttctgtaaaagttcaaagtattgttatttggggcattcacacctgcatgtttaaaatgcctttgtgcagaatgtagtccaatctgctttcaaatcagaccttcaaagaagggtagattcatccatgtgacagatccccttaggtgcttctctaaaagaaaaagttaagctagcaggtctacccccactcattatctttgtctctttgtgcgtaatcatcaaaccgcacctctgaaaagaagaccaagagaaaactttagtatctctttgctggagatgcaaagcaagatatagaaggaactggaaaatagttcttaagtaaatacagggggaaaacggaaattgagaggacgtacttttcgctaacagttgtaaactaaaaataaaatttgaagcacgcctgcaccctcacctgaatggacttcctccttggccagggcactttaaaatttaacctgaaagactgatttaggccgcaaaggaagtcagacatgccttattttacccctccagtattaacatcaccacagaccttaagtctgataagaaacatttaggatctcttttcttggaagcctgctacctggaggcttcatctgcctaataaacctttggtctccacaacttttatcttaacccagacattcctttctactgataataactctttcaaccaattgctaatcagaatatgttgaaatctacctgtgacctcgaagccctcccccaactttgagttttcccgctttccagctttccagatagaaccagtgtaaatcttacatgtattgattgatgtattatttcttcctaaaatgtacaaaaacaagctgtagcctgaccaccttgggcacatgtcttcaggaccacctgaggcagtgtcacacgtgcatccttaactttggcaaaatacactttctaaactgattgagacctgtctcagatattttgggctaacacaatgaatatgaaaaaacttttttgttggcgggggtgggaggtgggacggagtctctctctgttgcccaggctggagtgcaatggcgcaattcggctcactgcaacctccacctcctggattcaagtgattctcctgcctcagcctcctgagtagctgggattacaggcacacgtcaccatgcctggctaatttttgcatttttagtagagacagggtttcaccatgttggtcaggctggtcttgaactcctgacctcatgatccacccatctcggcctcccaaagtgctgggattacagggcgtgagccaccacacccggccaaaaacaactatttttaaagagcatctaagctcagaaatcacaggcatattacgcctgccactaagggagttagttccattgaaggatataattaagagtgaaatgaatggtgtgctaagcacttagggatagtggttcacaaatttgtctgttccttaaaatcaccttggggggcaggcgtggtgcctcacacctgtaatcccagcactttagcaggtcaaggccagaggatcacttgaggccaagagttccagactagcctgggcagcgcagtgagatcctgtttctacagaagataataataatcacctggaaatttcttttttttaatgcagctaatgaaggaaaaaaaaatccgaggttttgaaaccaactcaaagacaacagcgatattcaagcataagatgtaataaaggttgtacactagatagctagatagccagaataaaaaggaagagatagttacaaaaaatataaggaggataaatgtataggatttcataactgctaatcatatgattttactgagtaggtgtaaaatgcttctgataatgtgtgaaaatttataatccttcgtattatatgtaggataaacataggttaagacctggattctaaggctgaatttaaggctagtttatctccatccttagatttcctacatttcatttaagagaaaatgtcctgtatattgaatattcatgaaaatctctgaaaggtgttatgcttattcttaacctcttaaaggtgtacactgaatgtaattaaatcatttttgctggctctggttcctcatgaacatctgcttttgtacttccctgtcattcacaaatgcacttaggagctaatgatctatgaggacttttttttcccctacagtaacgagcagcaaatctggctgcactttaatttctcatctgctgtcccatattgtctggtggtcagttcatgatgttactaagcttggctttattggcatcttttgtgagctgctgctgctttttccttggcaaacctgattaccaagctattgcattgagcataaaataaaggtaaattaattcaaaataaaagtgaaggttgagggcaattcatttctgaggtagacctttaggatatgagatgcataaagtgaacaagatcctacaagtgtttacttgacttttctgggttcttttcacctacttactgattttgaatagtataaattcctggataattaatctggataagtaagtcgtcactgtacctctagagaaaataaaatcaaccaaaatatgtttaattctgtgctctgggtttcaagaaaacaaaaatgaataagatatagtcctacccccaaggacttgacacaatataattgtacatgtgcaaaagaaactgtctaggtgtggtggctcacacctctaatcgcagcactttgggaggctgaggcaggaggatcacttgagcctaggaatttcagaccagcctgggcaacatgatgaaaccttttctctacaaaaaaaaaatacaaaaattagccaggcatggtggcacatgcctgtagtcctagctactgggggagttgagataggagggttgcttgagcccaagaggtctaggctgcaatgagctatgatcacagcactccagcctgggcaaaaaatcttaagtagtctcaggactgtaccacagagtatcgtaagaattcagaggaggcaaagaccaaattagaataataagcacatgaaggcttccagcagaacatggtatttttgttgggccttgaacactctttagatgctttagtttaatgtgccatagtcacactttctgtattgggagtgttaatgggtgataactactccagagctttaggattgcttccagtatcccagcaaagcagcccttttcaactagaaccgtttgctattacaaaagagaggtgatcacttgtgatttcttaacatttcttcactttgcctctggcactgggcttctgaaagtccaggaaagagcaatgacctcagggttttaagaccaggggtataatcccagctctgcctagctctctgtgtaatttttggtcagtaatttaacctgggttgtgttctgtaaaatgatgatattggattaaatagtacctaatcatctaactttttcctaatattttattattataaaaaaatgcatgcctctgatgaattgcctttatcttctttagtcatatttccctaagaagtgaataaaagataccaaggcaatgtgtgaattccactttttccaatctggatgtttaggggatatccttgacaccatttgctattttgagttttcaacaaagagttaaaagaaaattctggcactcctatctagtcatcctctccagttggcagaagtcttcatgtggacttgatggttgcccagagcaacaaaatattagggacagaaacatgttcagggactcgattgtataagtgactcagagctgagagaccttttccagcttgactgcagcccatacttagctaaagtgggtatttgtctattcctgtctgcatactgtgacttggagatgcctattattttgcttgctaaaatatggaagccaaccttgaaactggcagagaagagttaaatgatcagaaggcaatcgtcttcattcagcacgtctgacacatgaaagatcattaggactagcaaatataaacaagatcagggagtggtcttgggctttgaagagcacataccaagaacatcaagagaactcaatataaattcaatataaaagctactattcaaggccaattatctcttttgagttagaagagcccaatggagagccactcacgcaaatcaataccctttccttctctcagttggagccagacatctctaactatcctctgaattaaactggatttttaaaatgtttttctgtccctaaactctttaaatcctgaggtcatcctttctttgttccatcagtctggctccatgataccaattactccagcttgttaaagcagttattggcatatggtagtcatgtcttttgtttctatgcaatgtttcctggagcaagaattggagggagaagtattagccaagtcttgttgctttaagtctcctctcttcaactgtttaactaggttccatcctaattatgtgtttggttggttttattttgatacccaatatacattcttctcatttgtacatraacaatgtcattatggtaataataacaattatacaatattactttctgtcctcattgaatgtcattatgatcaggagctggtcctcttggtttggacattatwatttgaaatgaatattctttttaaatgattggaaacttagtcgtaaattcaagtggtttacaatagtaactcttatcccagtaaccacagcacctgtttagaaaaatgtcttcggatcacttgtttgcaaatgtctttttccttaggatcctggatggaattgaacccatatacgttacttgacatgtgaaacacgtgtgaccctggcagatgatttggctgaccttgaaaactacagctgtttagtcactttgaaaacaatgcaatacaagtgatttactaggcttcagttttaaccattttatgctgactggtggaaattctaacccttcagaaagaaaaaaaaattgtgaagcaatggaaatgtaccatcctgggtattaatgtcattaattttcaatacattttctcacaaaaagtataaagaagtctttgcttgaccttacgggaaaaaacaacatacatgtggctttattttgcctttttttttttttaattaatgaagaaatccaagatttgacttttgtttcttctctacccaaatcaaaagcagtctataatctcctgcaaagatcaaagctttttgcttactataaagtatgtgccctgcttaggcattacatggtagaaagatagcattctgttccaagaaatctctattcgttctctagttgctgtgtatatattctcttttagctagaatatggttagtaaatgagtcctgaaaatttcgctgtatataccaaaacatgttgtataccataaatatataaaatatttttatttcaattttttaaaattgtgcttcaatcaagacagaagttgatttctttttccagaaattcagagtgagcagtccagggctgctgtggctgctctaaaatcaccaagggcccagagcttctttcagataatttttttttaacatttactagattcatagggcttttgtcttcatggtctgagatgactacaagagccctagccatcacaactaagtggccagcagcaagaaggaggaaaaaagaaggaatagtacacccactccttttagaaaaggcttctgagaaatcccacataatgcttctacttacatctccttggctcaaatttagtgtctgccacaaaagagaataagacacacacacacacacacacacacacacacacacacacacacacatatatatatatttttwttttttctggcaagtctctagttcagggatttcaatctcctttaagcaaatgagtcttctcgctaacctctccctctggcctgcccagtctctctcgaatctcattgccatcctgtcctccttactcactttgggaaaatccagctctgtcagttttacagtctgccttttccacttccttacctgaattcctgggaaaaataatcccacatcacttcaagctggaattccaacaaagtcaagacctgtcacctcatcggactctcagagcacttgacagttagttcctgctgtgcccctctctcagtcctcttcatgctaattccaaacctgtcctctctcttaagcctcccaaaccagcagctcttcatctcctttcagcaaataacttgttgctttttgaagaaagtctgtgtcaaggcatgaacttcctcagctcctacatcctcttgccatagatgttatccataggtctcttactgacatccataatcccttcctcccttctggtctcagcggatgacgtttcccttctccctcctgctctaagtcaacccctgcatctgggcccttgatcctctctcctcccagctcccacaagtccttgcttcgtctgttttcctttctatctctcacatcttcaatctttacttttattctggctctttccccattcatgtctctcacaatcttaaaaacaatacacagcaaaccacagcaaagttcagccaactctttattgatcctttagctagttcttgatcttctcttttcagtcaagttgctctacctcctcatccctattcagtctgcagtccactgtagtacgactttctcacaacacctctgttccagctgccctcccttggttgccaatgaactcctaattgtcttcttagttcttagaggcttcttcttcttaaactctttctttgttcatttactgagtaaatatttattcaacatgtttttgttgggagccattttgttccagatgtttccacactcttcttgctgctctgaatacttcttttcactattcttcatggtctctcttcctccccactttacctcttaaatgtgagtattctagaatgttctttttgattaattggttttctcactctgtgtactctgtagatgttttcatgtacctcatagttgtattttccatcttatgaaagtgggtcccaaaactctgtctctactcagagtaggcacttccccaatttccaaatttattcacacaaaagcccaatgtccattgatatccaactcttcaaatccaatatgtccagagctggactcacatatttctttgcaaatctgttcttcctatctcagttagtgaaacacttttagccaagatcgaaacttataaatcatgaatccttctaccaaatctatctgtctgtctatatatatttttgaaacagagttgtctcactctgttgcccaggatggagtgcagtggcaagatttaagctcactgtaacctccacctcctgggttcaagcaattcttgtgcctcagcctcccaagtagctggtattacaggtgtacaccatcacacccagctaatttttgtatttttagtagagacagcgtttcactatgttggccaggctggtctcgaattcttggcctcaagtgatcctcctgccttggcctccaaagtgctgaggttacaggtgtgagccaccatgctcggccccaaatgaatacaatttttattttattttataactattgatcaaatccatgctctcttctctaacctgctaatatttccctagttcaagcactcaccaactctcccctgaattatagtactagtacctgaaatagtgtttttgaaactgtcagttgcatttagcattttattttaaaaatatgatacagaattgcgtaaaaaataagagtataaaaccacatctataatatcaaagataaatatggttttataaaattattgatacacccacagacatgcaaacacacacagacattttgccatgaaaatgtatttcttactataatttttaaaattagagaactactttcttaaatggtcgatctctgttgcacctcttcttagctctggccttccatgatgccagcaaatttatgtagttgaaaaattaatctgcaaatgtcactcttcttaaaaccttttcaagccttcccatcatccatgataaaatcagatctctttcgtgtggtacccaaagcccctatccagatatgtattgtacctcctctccagcccagcccctggctgactctttcagcagcaaactttttccacccacgtgcaccatgtttcacaactgtcttcatttacttgtactcttctcaccatctaaaactcgcttctctctcataattgcctggttcactttatctcattttagaggacacctaaaattcaagcccagtccccttcctcaggccgagtcaggctcttctcccaaacctacctctagcataacctaatgaaattgctctaaaaattatggtctatgcctctttattaaaaaaaaacaacaacaacaaaaaaaaaaaccctgcccaccagtatagcaattcttttgttataaccacacatagtactagtgtgtggttctggggcactgtcatgccaacttacctgtgttcaatagacctgaagtagggaagatcagctgactcttttacatctcttctcagaacatcttgaaatgattcttgggtgcaatataagagcaaaacatggaacagtagaaaccagcatggaaaactttttctcctatttgagaaagtgggatgaaaatgtgtctcttaatccctttggcagaagggagtaacttgaaagaagtggatgatggatgatcttctccactctgtcagccctctgagcagaatgaggaaaatgtgagaagcgataccattgctatatttgtttcattgaccattattttaaataacttacatggtcctgaacaaggacatgtttttgtgaaaaggacaacatttcttttggtgtgtccgagtagcatttaagaaaagccttatagtggtcaatgaaggttggcctttcacccgctgctactggagagtctgtgagaacactatttattcagcctcatggaaacactagggagtcatgcctgggatctgacaactgtgcagcaccatgccaggtgcacagagagttgttgtgatgaatgtcgagagaggtggtgggggatttttgttgtttttgctccttccattttctttccctctgacttgggctgtggtttcattcattctacctccccacccctatgcaagaatagatctctgatctctttctcatactttatctgccctaacttccactttccttttcttgagaggagaagaacaactccacagtgctttccttttatgttttgggctaattttgttgtgttgttttatggtcttgaactgagagctgcctcagcactcaacaccagcccctggactgtgagactaatgagaaaagcaaaatgacttcaagtaaaaggaagtggtttgtgttgtggagagaaacttggaaagaaacaccaccaagaacactaggggctttattttccctaaagcctacagttgggttaacacatttcaaaataaccggtcaatttagttaatcccatcaaacgacctagtcaatacagtaaagaggtagggcaaataaacaaaccgttttttggatgaccggtttagcttcatgtatccttcgtcttactcatttctagggaataatttcaactcaaggaaatgtgaacatctgttttgcaaactattacaggctggtttaatacaaaaatacctttaaaaaaggtatgttcatactcaacatgtttttccagctgttattaaagcaggtagaaacaatatagtaggcatagaaatcttgattataatgtggaaaaactaaggttaaaattattagcagaaatacatttcttttccatccttccactgtctgaacatctctctttcctacttcctccattttattattttctttgctttgtttctctcttttaacctcaataataacaattctgtgtgccaaacactgtgctaagactgggcatgcatgatcacataaggtaggtaaaattattattcccattttacagaagaagaaactgaggctcagagaatttagggatatgtcccatggtcattattctggaaagctgtggagccaggcttcaaaacttggcagttatatttcagattccacaccctgcagtcaacactctgctgcctccctcaaattttatctcagttcatttgttttctccgatcttctccttttcacatgttctctactctattctcttgcctttttcctttccttatatctgcctcttctttttccagtctcttccctcactccttcccttatttgtcttgtttcccattctttgtctaaatctcctcttttctctccctcttcaccctattcattcccagctccctaaaattatatcattcttccttcatcatgctccctcattcctcactgcagcatcacccagtccaactctgtcccatctgtgattcctcacttctgctttcgcaccatctctctccctaaggtagaagtggtgcccagctttaaacacaaggcaaagtgagggtatgttccactaggacagcgtgtgtcactctgctgccatacacagggagtaccatcagtgattataaagaggaatttcattcctgccagagagctcacaaattaggttattgttgatgttcatatagtttttagtgactggaaaaagataatgcctccttctatggtcactaccaggaagtgagctccatgcagcagacagaaaccaaccagataactgtgagatcccagccaagcacaatttctacatgttagtcaattgcaagaaacactgagatgtaatgtagtactttggactcatattactcaggtgactatgttttcaagcagccagtacaggacagaagagattcatttccttgaatcaaagctatttggtgacttttcctggaaacactctgaggcttacaggaagggattccagattcccaagctactggcacagagtaagcatcttttctttacatagtaattcacaaacgtccctcatcaccatatgacaatatcctcactggatcagctcggttaccagaaataactagatcaaaataaatgtcattctcacatggacacaggtggactagggtttagaagttttgggaaccatcacagttctaggcacctgaaacttcttcttttgcttgtagtaaatatggtgtctttctcaggactctgccctttgtttatttatatatctggtctggtttttgttttctagagatagttctctactctccatagtgtctgctttctcattgcctgagtttgtacatggcttgccatagcttctctaggcccaattttaggccatcagtagatttaaaaatttttttttctcttgacaccaattaccttagttgcaatttcccatttataattgcaacttgagcctacaaatttacaaatacaatgaggtaactttccactgtggttaaatattatagattattggctgctggtaaacccatgaattgcctgcctttggattagatattcagaccaggtccatttaacaattcagacatttttttaaacaatacttttttgagagtcttccatgtgccaggccctaatcaaagctcttgagatacattgatgaccaaaaagaagcattatccccattcttactccttataatctagggtccagcgacasggcgagatatgcactgtattaatgaaataatctgtactgaatgtaaaattccaaactgaagcattttatatgaaggaaacattctmtaaaggaaaagtgcggaaggcccccagaacgttccagtctacacatgctcctggaattttatgggaaaataaaaagtctgtcagaatggatcttttgagaagattccagaagtatgttggccaataagagaaaatgagcaagtggatgccagaagccatttcttccattgttgtgctcagtttgcagtgatactactgcagagcttgaaaggcaagtactggcttctcttcctcttgttcttccacccagaaaaaccatccttatcctcatattcctcctccaccttcaccaccactactacctattttgaggctgccaccaccacactataacatattcctccccgctctaaggctctgaatttggacctcccacatgacaggactctaaataatgactaatccattaagtttctgctccatttccaaaatattcattcaaatttgaaatgcctggggcctcttgtgtagccatggctgggctaatttctgcatttgcattttaaacaccctgaatcaggattacacctgaagactttcaaataagtgcttagatggcacaataaagatattcaggttaaaaaaaaatctaatgagtctgttgttcctttgcaaggcctagtgataggaacctcttcttggaaatatttgttaagccattctcacttgtagtcactcttggtaccaaatctgttgaccgaaaaaaaaaaaaaaaaaaaaaaaactcgaggagagagggagaaaggcaaagttactctaatgttttaactaacccatataaccacggagaaccagccctaggaaccaacactaaaatcttaaggactgttttttcagactctgaaaattctcctaaatctccattccagtatcattcaagctctttacaaccgctgtttgtccttaggctgtaacttgtgcctgaaatcccactctaaggttcccttgtggtatttttaatagtgtttgatgctgcagccagcttctctgcggtttgggagttaaatgggatacagcaatgtggtgtgctgtaatggctcttggagaaatgttagggcaaattaaattccaaataggatagcacctgaaagaacctggtcctttagtgaaagagcgtaggaaggaaggcttagagagtcttactggctcctaagtgattaagaagaaacatctaacctgagtttgaaattcattttggactcaaatacagagtatttactttaagacactggtccttaaccacctggttcttccctgtttgcttttctgcttagttaagcccaaagatgggtgttagtttaagagaaaatggtactaaaagggaggaggggaataattaacacctttgcttaaagcaccaaatcccatgagctgatgattgcctaggttaggcaatgactactaccactactaccaaacaggtctggcatctcctattcctatcctgacacccaggcccaagctgagcacaagcattgcaggattccgcagcctaatgtccgtcagcttttcctttgaacagtggttacatatcgttagtgtatttgagtcaaatgtgggtttaaggtagtggaaagacttttttctgctattgagaacagaatcaattttttaaaatgtgtatgtacacacacagatacacacacacacacacacacacacacacacacacacaccgctatatattttattttggaaaacagttttatttccastagatctttattgaataacctatcatctacggagttcctatttaaaagttttcattggtaatggatttattccagacaggacaggttatatgtaaaatacaattcgtaaccaattaaaacaataacaaataacttgtgctgagtggttaccatgcaggtgctgggatacgctttctctctacatcatcatttcaccctctccacactgtttgaggtgtggatctattgtcattgtctccatgctataaatgagatgaggcacagatgttttttattatctccatgaaacaaatgagagcactgaagcttagagaaggagagaaacaacaacttgaaggtttagatactgtttgaggagttatagtaaaaagaaaaatgaaaagtcctctcaagttccactgaaaatcttataagtgtgtttctttcccacttttgcaatataatttttctcttctaccctcaactgaaataaggtcacacagcctatacagtatagaaccaggactccaaggtcactgacaacaaagtaaaagtcagcagttttggaaaatacatattttttttttcctagctgaggatgggttaccttcattagtgacataactatgtcacttgaatatcaattattggcttgaatatcaattcatttctctattaagaaaaagaggaaataactcagatataaatgatggaagtggctactgagttaggaaaacatttgaaaatcactttataccaagaaatcacattctggcaggcctaatatggtataggagatattcgtaactggttatcttcattgaaagattatagagactagagaataggaaggttaagtaaaaactctacaaatgataaaattttatgttaacaagtaacctaaccaaatactgtatttcgctggactttattgtagacaaacagaaattctggcaaaagaaaaacaacaaaaaataggaaatacagttactaagttaaagctcttgcatttacattataagtatttctaaatccagtttaagattgtggaaacaacaacagaagtatatgaaattctaaatgccatttaattaaagtgttgaaagagtagagatttcaacagtatcaaaacttgtgatcttcaaggatcaaagtaaaggtgagtttatagaatgctcactctaggttctgatttggccaagttcaatcacaccactgcccaattcaatgaaaaatataggcaactttgtcaagcaatgaattttatcaatgtattcaaagttgaatgcatcttaggaataatttgagggtttagaaaatgtttgaggttttttttaaaaaaaatcttccaatttaactgaaaactcttgtatttcctttctacttttcaaatatagcctttgtcctttaccctccattgtagcttaagatgtggtcttgcattataaggaatatttaaaaccattcaatattttaaaccaaagacattcaatttttaaaatttaaatggaactgccatgtattcttgagtgttgtagctatacagcagtggtccccaacctttttggcaccagggactggcttcatggaagacaatttttccatggatggtggggagaggggttggttttgggatgaaaccacctcagatcatcaggcattagattctcataaggagtgcacaacctagatgcctcgcatgcacagttcacaataggattcacagtcccactgatctgacaggagataaagctcaggtggtaatgctcgcttgcctgctgctcacttcctgctgtgccaccaggttcctaacaggccatggaccggaagcagtctgtggcttggaggttggggatccctgctatatgggccagaaatgtgaaagaggtgttcagtggggagtatacttctaacttgaatacattcttttcagcatttctacttattttatcaaaaggtaattttttttctcaggaaataaagcaataggcaattgttttttatagtttttctgtacagagccttattcaattatactaccaatgtaatcctattgcactgctcaacagaatcagaataagaagaacttccaagtacaatttgaaaataaaagtatctttcaagaatttgcactgtactgcattatttgatttggaaaaaaaaaaaaatcagaccacttccatttcttgatgaaacaactaactcatttgctaactttcaactggctctcttcagtggctttgagaatgtggcacttccatcataccttgcctgtagtaccaccctagaactttttttaattgaaaatattttaaaagataattgattcgtatgcttcaaaattcaaaacgtgccctagaaaggatcgattattaacagcttcttgtgtattatgtaaacaaatcttatgcatatacaagcaaaatacatattggctagcactcttaaaaacataggaagggttgaatctgaccaagttaatatttcaaaggtgtctatcagaaaggaaaaggaaagcttcctacagttatgtgtatatttttttttagtttaaaaagaataagaacaagatattgggtgtgtatgtatatatgtatctatttatttattggagacggaatcttgctctgtcacccaggctggagtgcagtggcaggatctcagctcactgcaacctccacctcccaggttcaagcgattctcctgccttagcctcccgagtagctgggactacaggcgtatgtcatcacgcccagctaatttttgtatttttagtagggacagggtttcaccatgttggccaggctggtttcaaactcctgaactcgggtgatccacccacctcagcctcacaaagtgctgggattacaggcatgagccactgcgcccagccagattttgggtttttaaacctattgaacttatctttggatacatattttaagttttccttaactgtaaatgtgtttatgttcactagaaacaccacatgatttcgcagacatggaattatgtaggtgaaatcagcggctttcaattagggctcgataatattagatatagtataacttttatggcattcacacatactcttcagggataccctttgcaattccggaatagtgtttttcttgcttacttcagtcgatttcttatatctttaggaaagatctgcacattcattctaggtgaatgtaaaattgcattttaaatccattcattgggaatctcacttcttaaaaatcatgcggaaagatagatgtacatttttagtaaccgagctgttcagtaaatttcttaagattattttctcataacctctgtacatcaaaagtgaaaagaacctgtccccttctctctgtatgcaaaattccagagaagcaccaagaaccagaagaagatgaaagattcggaagagcacacattttccagcctgccagcctgggtttaatttcactttcccaaatatttacttggtaaattcagaaaaatcactggacctccaggaacctcatttccattactgtcatgtgggatagtgataacactatggatcattacaaatattaaattagactgtatggagaatgctccaaaagctaaattattgagtgctcacaaaaagcattcaacaaatacacctttccagttgaaaatgatcattccattaaattcaccctttattttctttgagaaaaaaaatctatgcttctgcattttcaaacttacttttcatggatacatagtctgtaataaaaacagcatattaaacatacctttaaaagaacaaagacatttataaaacaataacaacaatcagcttctggatggttcccccccccccccccattaaaccctattaaagggaatacggtctctaaaagggaaatccagagacctgtgtattcgagttataaccctgggtcaagcaacttaactaggctgatattttggcttgatgtgatttatatgtaaccttttaagcaatgtatattaaatccgtactttttactcatctacttgattgcaagctcctgcaagataaactttgttgaactcaaatgttgtaaacttcatggggcttagatataaactacagacttcatcagtgtttaacaaatacttgcttaagaaacacaaagtcctgttatatcagccaattaactatgaagctaattttaataactgaaatatcatagaggttaatattcaaaacaccactcatcttttttctcattgagtattatttatttatttttgctttctggagacatacgtttaccctttatttactgtctcattttgtcatctctgaacataccatttacagctttttagttattctggaaaaatcactttgtatgaaataataggctatgatggctagaaaggatctcactgatcatcagtgcaaggattgattttagaaacaaggaaagtgaaaccagagacagccagtgactagtctcagtactcagagaggtcatggttggtcagaggtcagaactcacatctcctgacccacagcacgtttggctttgtgcacaactgactgccttagttaaggacagataattcttttctctttaacaatagaaaattagactaattaaagtcataaaagatgttgctcctttataagccatagagaaacccccgatggtttctttatttggatctgtgatctttaaagcatgtgactagcagctataattggattaaagtgaaaacatgtgattgtgaaggagttaaagtacctttgccttattctgctttgatagccagcttcaattgcacatcgtgacaagcagtgaaccaacatcaaccctgtggaattaaaactttagactctatcacaagcttttccaagttcaaagcccaccaatttattattggttccaagttctaggtctagaatcaagtcagctgggacatcaaatacttgttacaaaatgacatttgaatgagataattataaatagcactagaagcacatgaattaaatattgcctgaacactaattttcttaggtaggatattgggatgtcctttgctttatcactttgcagtgatgtgagcagtatgagatactatgttttgcaaaactgtattaattataatatttattgagtacttactatgtcccatgcacagtccaagtttttcatgtacatattattatttaaccttcactgctatgcttgcagatggatgtgtggtatattttagttaactcgctcaaggacatgcacagtaagcggtgcagctgaagtccagactgggtcaggctgactccacaacctcttaatccctatattaaattgatatatctgcccatgctatacatctacttgatctttaggttgatttattgatagtgacatttaatttttgttttcttcaaaattaaattcttactgtaaaactagtcaaggcaactgaagtttgtgtttgaataaaagtgtagagttaactgaggatttgtgtattctcattccaagatgagaagggagggagggaaggaagaaagaaggaaaagagggagggaacggaggaagggagggagggaaggagggaggaagggaaggaggaagggatggaggcaggaagtaagggaaggaagtgaaggaaggaaagaaggaaacagtaaaggaaaagaaaggaaataaaaagtaacttcattcctctatagaatctctattaataaatgttattttttaaaaataaaaatacagttatttttcatgaatataaattttagaacatatttttcagtgctccttacctaactcccaaataatccattacttacatttctttttttgagatggagtctcgctctgtcacccaggctggagtgcagtggcacgatctcggctcactgaaacctctgcctcctgctttcaagcgattctcctgcctcagcctcccgagtagctgggactacaggcgtgtgccaccacgcctggctaatttgttgtatttttagtagagatggggtttcactcgatctcctaacctcatgatccgcccgcctgggcctcccaaagtgctgggattacaggcatgagccactgtgaccagcccatttcattctttataaccattatgaattcccacctagtttgagaaccactacttttgtgtggtttccaccctttgtgtgatttcaaaaaggctcgcctttaggcaaaatttagcaagaagtcaagccaatcaataattgcttgaagtcaacttttccagaataaaactgtataagggactttgaatttgaaggttacmatctaaagtttgctttgagatgggaataatacgtagtgttggggattattgtaaacctaagtgatctaattggaaattagaattgaaagtgggaaagtgaaggaggaaaaaatgaaggttggggagaaaagaaagcaatttaggagactctatagggaggaaaggatgagatgcatttcagaaacaaaatattaacgtaaacagaaaaaagagaaagcaatcatgacaaagcctaagagggctagtggaatgctagaatgaactcatttaccttcctttgatatttaggggctctattgcctgctaatttcatcactgttatttttcttacctcttatctttttccctgtagttattatcagcctaatattcattcattcattcatttacctgagttttcaggcttgtgcagagacaacagggtggggccaggttgcaagattgtgttcccaacttggaagtaacgtgggtaaggaaaaagtcacagctggccttagaagacacaagttaaccacatcccatgggtcagtggaagaaaacaagggaataattagaaaactgtgcaagatcagaagggagcccctgaagctataactgcaagaacctccagaccctattgcctttaaatccccttttaaaaggcaccaagtgaggaaaattccaagatgaatgggttacgggtctgaccttcaggaacatgtaggctgcctgccgatgtccacaacatcgtccctttcacatgcctaatacattagcgtgggccactcatttaaaatttaaaaaatttcatttagcatttaaaaattcatttgacagaagagatgtttcaaataaatagtcttcaaaaaaagcccggtctataagtctctgtaacacagcccatctgctttaggtgaagtgaggcagtaggcctggagcctcacctggttggctcttaaccacatttactttccaggagaagcctttcaccaacttcctcagaacctccaaaacaccaaggaacaagatcctgaaattgtccatagtcttaactttgttaataacagactgcatgcccctggaaaaactatttcacttctcttggcctcatcaacaaaacaaatgtggcctaaaatactttgtaagatggtttcagttgtaaacagcctgaaaactcttagtacaactaatttgggcaagtaggtttggctacagataaagaacagaaagacttagacagtggtatacattactctgaaatatttttattatgtaagtacaaataaatggatgtctaattgttacttttcaggtagcaacatttgtaggaaatgcattttgttaggaattttaaaatcactgaacagattgccatttagtttacattttcttctcacctgcagatcctgaaacctctgaacttttcttctgccacataagtcaaatatccatttatagtttttaactcttctctttggcccctaaaaatagaagatcattcctgattttaaaagtagcacttgtatgcatatatataatttttatctttaaaggaatacgctgatgattcctgactctagccagtcctttgcaaccttcaaaggattgtctccttggccctaagatgtaacattgttaaccttttatgacagaatcacgtcaaggaatattacatctcttctagttcctgtaccatatctttatgataagaatgtgtgcttgccatctcaaaatattgaccctctggtacaatcacttgtatctacttgaatacagatgtcttgttactatttctggaaaatattcagtaacaaatttttctctgaaatattgttattaaattttcttaaaaattgtttctaaccttctttactagagctcactataaggtagtctttagtttaagaacttcaacactctctgattttggtttaccattttcatttgtgcaaaatgaatgtgtacataagaatctgtatttccaacccaaagaggcattataatgaccgttaaattttccatccaagaaataaactaactccaccatccctgagtgtataccctgcccttctcactcttgtgttctttaattagacccaatgtgcaggacatgacttgactgaaatttatagccacattgagacatgcagctaaagaaagctcttagaccaggcatcatctcaaacttttaaagcaataggatcatttgacagaagtgtgactcgctatagtaattacacaggtgcaagttataactacttaatctgctcccagcatctctgttgcccttgagaagtatgatgtcctctagccaacatggctgttcatatgggactgaatctgcacatatttgaattgagtttttcaagtttagaaatgtgatactattttacccttatgtgccttccacaatcctactcctctcttaggtggatcagagtttctggaatccatcatctttagttctgcaatttacatctcagacttacatgtttctaggcataaatgcaagaatgacaacatcaaggcctatgaaacttagacttgtatgtatgtgatggtagacattgaagtttgttgcaggaaaatgtttctctgtcatcctaggaaaagcccccagtttctcagttcctcctcctccacacgacagttttttagtttttttagttttttagtttttttctaaaatggagttaagtccaggtgcaatagctcacacctgtaatcctagtattttgggaggctgagatgggcagattgcttgagcccaggagtttgagaccagcctggacaacatggcaaaaccccatctctaccaaaaataaaaataaaaaaaataaaaaaattggcatggcagtaggttccagtagtcccagctacttgggaggcagagcctgggaggttgagactgcagtgagccgtgattgctccactgcactccagcctaggcgacagtgagaccctgtctcaaaataaaatccaattatgatcatacctctctcctgttgatgtccatcagagtctgcaatgccttcagggtaaagtttaaacttccttctagaaacaatgttctgcggtaaaatgaccagggtctttggtattagatacacctggcctcaaaaaatgggtcagcccaggtataaccttccccatcttctgtttcctcatctgcataatggagtaacaaacattgtcaggaagttactggagtaattgtgtgagataccaaacataaaaagcctggcacaaaataaaagctcagtaaatgtaaatgtcctgtcttttgcctttccctcattgtctgcgacttacctttctaggttcctttctcccatgtgcatccccttccttccaaagcactcattgattctagcctgcagtgtatagtttcctgatcaagccaagctctcccacacctctgtaacttttgcgtatattgttcagtctccctgtaagtcttccctaccttcaccttttatagaaactgcagggtacctacttgccccttgagatagctattcctgaatttctcccgaatttaagcattcctcctctatactttcataaatctttcacacacctctttcatcctacaatgtcataatattagttggttttatctgtcttccttaatgtatccttaactcctgagagtggacgctacatcttagtcatctatgaaaccccagaaaatgtaatcaagctaaaatggctcactcatttcctagcaaatattggttaaatgactgaatggatgatacagggggcaaaataaatatggttttagaaaagtggcatggctgctgatctatcagtgcaaaaaggagcacacccacccactacatggccaaaaatgttgaaggcaagagactagatggcttgtgaataatatcaaatgaagttgtctttctgtaggaagtcttagacaatgtaatcttgggaggcgggtggatcacaaggtcaggagttcgagactagcctgactaatatggtgaaaccccatctctactcaaaatacaaaaatagccaggtgtggtggcatgcacctgtagtcccagctactcaggaggctgaggcaggagaatcacttgagcccaggaggcagaggttgcagtgagctgagctcgtgccactgcactccagcctgggcaacacagcgagattccgtctaaaaaaaacaaaccaaaaaaagaaaatgtaatcaagctaaaatggctttggctttccttcagtaaatggttactgtgggaatatatgtgaaatgaatatcaatactatgatgagaaacacatgcactaaacagctatacttctgatgccattctcaaatctgaaactttgcccaatttcagggacaaaagtgaagtaatatgtatccccagtgtttagcttttctcttgccatggatactaacagtgagattcctcagggactgttcctttaacctcgttagggttgctaggggctattgtgcctttcacaacacagcacctgcaactgggaataattgaaattttctgccattagctattcccagcagagtattctgagtcacatagaaagtgtcagaagcatataaattactgatacattttttaatcccatattccctcagggttggcgtttttctctcttgaaagtttcccccttaaggctgggcgtggtggcttacgcctgtaatcccagcactttgggaggccgaggcaggcagatcaagaagtcaggagatccagaccatcctggttaatacggtgaaaccctgtctctactaaaaatacaaaaaattagccacgcgtggtggcgggcgcctgtagtcccagctactagggaggctgaggcaggagaatggcgtgaacccgggaggcggagcttgcagcgagctgagatctcgccactgcactccagcctgggcgacagagcgagactccatctcaagaaaaaaaaaaaaaaaagaaactttccctcttaaaatattcttgtttaaatctaaattaatttcatagataccatttccatttttctaatgaataatactgtatcctttcctatctataccatgaagtttttctttgccttgaaaacccatttagatttatgatttctagcccccaaaataacttttgttcctatatccaattccttccctcacagttctttcacaatagcttcttttctcctgtaaaaccctacataaactccaaaaacatttctagttttggaaatcctaatccaagaggtcacatcactaacgcaaacgtagaaatctttgtaccaaaggacagaggtgcaagggaagtcgggagttgtggctgtgggaaagtgaggaggactctttggcatctgggcagaggtacagggaagccaggatgggggcagaaagaaagtttctcagtttctcttgtgtctacggttcatgcttaggcctctgcagcagccccaaggcaggtgagggtgatcagctgttccagtttgcctggcactgagggatttcctgggatgtggggcattcagtgctaaaactggggaagtcttggacaaattaggacaagttggtcaccctacctttcccttgctgctgctgtccttttaaagtcctcattcctttgaaaattgcagtgatcttcagttcttcgtgattttaactgtatacaaatattcaaagagcttggaccagcacatttctcagagagagctctacttacagtaaatgttatgtgacagagcaggatagcaaatagatgttacctggggcaactctaattgcttggtcatgactgtcgggagtaaagtgttaatagtttcttgcatatcctccaagagagtattacaaatactattctgcaccaagctctttgtaatttaatagtgtatcttggggcccttttgtatggacttatacagatcatgatctagagataatgatcattcttatttgacacatagtattgcattatgttatgtctaaaaacccatttaactctattgatagtcttgtgggtcatttccagtttttactacaattaatacaaataacactgcaggcatccttgtgcctgaacatctttgtgagtttacccattgaataaagtcttagctgtgaaactgaatttaaaattttcataaatattgccaagctgtcttctaaaaagaatatattaagttacaatcccaccatcatcacaagaaatgcttgtatttctatacacactgaccctgagattcacaaaaaacatattttccccatctaatttaattgcaaagaaaattagtcacctttcatacatttatgggccagttccctcctacctccaaagactcattgaatcaattatcttgaggagtttattttttatggatatgttaatgttttgagtatattaagaaaatgaactctcctcatttgtgtaaacttttcaaaaaattttaatttgtttagggttttttttttttatcatttagtcttttaaaatatttgagtagtcaaattcatcctttcagatggtttctggacaccctgtatcttttatgcttgtttttcctggcattcggtgcagtacctatcacaaaatagattctcaataaatgttttttaaataaatggacaacgaatgcatgaataagtgaaggatataatttattcttttcattcctcctcatgctatgtagagatttgcaaaatgaatgccaaaacatatctttgaacagaatttcatggcccagtatcttcaggcagtggtttttctgttttgttcaaaatgatgtccctatcatctgcatagtgctggcgtatgggagatatacgtattgaatgaatacataaatatagagaataatgagataaatagaacgtggattatttggagttcatcctcctgagctaatgatgggcatttctggaagtgctgggttgcaaataagtccagaccagagaggattgtgtttaaaggcccagaatctcaactgataatcctcagaagctcagatttacttttttcattccaagtaaattaaactggagtggtaagaaaaagaaaaatggttatgaccatcaaccccagaaacagggaccacatttaattgaatttataatgtccctaacatctctgctgtgtttgaaaggttaaaaatttcctagagaaaacagcttttgctactacttgccaaagtactcataaaatggactgattgctaagaacagaaaacaaaccaaatcaaaataaaatgaaccaaaaagcaacagaaataaatgtgccttaatgtagttggatgattaccacatctactctcctcagaccaccagccttcagagtaagggcacatccttccaaataagtgcatccttgtcagggacatttggtgaggtgcaaccccttcaatgtgtccgtttcctgggtcatttggggtcttaggaaaatcttcttgttggtgcgcactgaattgcacatgcattatgtaactcattgcaacccaatagctgaactcatggtttcatagctattaaaatatgccacaaaccaaaccacctgtgaggcgccaactcagcaaatgtgccttttcagaaagtagtcataaaaggtacaaaaaatgaggatgaaagaaccctgaataacaacctagagctcatacatttggagccatgaggaaaagtattccatgtaagttgaaggaagatagcagtcaggagcattggtgttgaagaccaccctcactatgagaaagggtcatatatataatgtggaatgaatcagagctaccactgtgggtcccctgttggaaaaactgcaattttggataattatgtgcaagcactaggagaaatgccagatgttagaatccatgtttaatgtgaaaattgcattttgttgtttgcagaacctcaatatatagctttctctataaaatgtgggcatatttctgaaggaaagaaaaatgccagggtttcgttttaacatcctgttacgttttagttaaattcaaaggaacatgacttttcaaagagaaaactgtctctctctcataaaatagcattaagtggttccaaacatatcttaggttataattgaaattggactctgtggaacaaaattaatgatggtttgttctcaaaggcccattgtcccgttgattttatcagttattctttgttaataaggtggtaatgtggtcttaagagcttccactactgagagaatccaaggaatcatagataagtaaattgatgtcaaatattatgactttttctctttcattcttgtactgtatctagttgcctcatctttttttctaaatctcacagtttttgatcaaattccctagggacagcttacatgctagctttatgagggaggtgagtcatgcaatcccaagaaagcaaaagtggagttgagggggtgaaaggaacagcagtagggaagaagagaaaccatgtacaaggtaatgcattactaagcttgtcagagcttcccaacaacaacaacaacaacaacaacaacaaaactagttgctaagttacaagggacattgcctgtgaggctgtgtcgtaaaacattccacatggagaagaaagggtgagcaatttttctgtgcataggtcttttgtctctcattggtcaaagtttgctccatggtacccttggccctcccagagtccctggggaatacagagcctttgtccatctcacgtgtagctggatggttcctgtcaagtcagaggccattgcccacgctaagcccgcaaggatggggaggtggaaaacatgaggcaattgcagtgataaccgctgctttactggggctgctgtggcatgcctgggaaactgggagagtggcttatgcccaaggggtagggtgggcagagctgacctggggaggccacaaacaggacctagtgtacttttctacagtatactagcagaattagaatgaatcagacaagagatttattaaattaagcttttgtaatgtcctgatgtagtgcactgtattttaatgctgtgtcttctgttgcttgagttcctaatttgtaccaggtgttgtgccaaatgcttcaaataaattaccttgtgaaatcctcacgactctatggactccaatttacaaatgagaaaactaagacttaacttgcttattcttcaccaaggctaggaagtggcagagttaaaatttgaatccaggtctaaagccattggtcttctatgccatagaatcggcatccattttgctactcttactagaaaatcatgaatcctagctatgaattgtagtgaggaggaaagttttttctgtttcatgtttatgaaaaaatctctacctttttcatttttttggttggttttcaattggccaatggttggaaacaggcaattttcagagattttgtgtaagagtgtgtgtatatatatattgtatatttacagacagaaaaaaattgagattaatttttcaattctctaagtcataagagaatggaaaaacagaaatggacaagcagaattttttatcccaatgtattctttgacatacactggtcataatgctaatgttagcaaaagaaataaagaaatccctggtgcaatgggatgattgaccttcctttagcagaacagtgttgacttgttaccgttgtcaaatcagactgaacacattcaacaacatgatcatttctacttgtgggtttggactgacaaggacatttctagtatatcttgttgacatcaggttaataagctctaagcaaagctgaaaatgaatgctacttcccacaatcaagtggaaatgttaatattatcaacatgtcttaaaggccatgaagtcctatgcctgtatatgtaacaggaatagcaaacaggaacttttcttaaagggaagattaaactagtgttatttttatgtattcgttaattgcatgctccccatttttaaaactgtacctgaaaatatactgtaataaaaaattaaatttgaaatattataccattgaataaggtcctctggatagttttgagatttaatattctttatttcaatttacatgtatactgaatcacgtaaaagttatttaggtcagtacttccccacatttgttccttcatgacatacgctgataactatatttctacgaaaactgcagtaaataaaggatgtggcttgtgttcagtctcccacccactagcgacaagagccaagggaaatcaatagcttggctcacctgtcatctccactctttggcacaccattgagaagtctaatatgtgcaaagaaaagttaattttactttcaagggttatacctttgcttattccaaagaacggtgggggagtgtaccagggccattattataatgtatattattaaactttttacattttaactgatttctcttatagtaaaattaattatatattagctttggggtatacaaaattgcactttgataataatatttaggaattggcaactttgtgggcaaagttgtgggaactatcagaaaagtaaaaaataaaggtgggacccgaaagaaggaaggattgtaggttggagccatacgcgactagaaactaagacatgtatccttaaaaaccctcaaatctgtgttctgatgggaaaaccctgctaagtcaatggttcccagactttggaatttcaaaacaaaaaactgtgaggcccaacatacaattaccaactcttcatttttgccaaacaaaactattttcaacagaacacactaacatatactggaaccatgatttcatattatgacatttattttccacattctatatacttttaatatgcaaaacaaggacaaaaagggcagtcatctcccatggggggcttagaaatctctcattaatgtgtgtgtgtgtgtgtgtgtgtgtgtgtgtgtgtgtgtgtgtgtgtgttttaaattggccttattatttctttaaatttaaccaagggccagtaaaactcccttttggaataccacacgcccgtgctgttcaggaatgattatgataaagtcattcatgaggacatagagttatttcatatgctctcaaaaatgacttgcagtgcgaaacacagctactattggacaagacaacaacccaactttatataacaattttttaattcactagtacttgtgtatcagtcaataaagtacctggtacttgtgtactaggcactgggatggagttggggatacgaaagtgaaaaatatagtcacaatttctaccttatactctagtaggggaaagaaaaacaaaatgtatgattgaactgccttaagcaccatgaaggcaacatacaaattgctgtgagagcatataaccaactcagaaatcagccttaaactgagacctaaaaaggactccccctgtgccttttgtatatttaaggcatcttttttatattctagaaatacaatatcattgagcagatagattccaaagggccatcttctagctggatgaaatagaaaagggcacccyttcctcaggctaacagccctgcctgctgagggcatagttaggtgaatggatcatcactaatgaatggatggttttaaagaagggaataacatgaccaaatttgcatttaactttactcaatagtctggagtatttaaatatgattaaaccttttctttccattcacttgaatgaggcagaagggctattcaggaatttaaagttgactaaggtattgattgggtacaaaatttttactaggtaggtaagggcaggatgattccattagaaacaagaactttttctccagtgctctgggaagaattgattggttcagggctaaatcaccaagatgaataccttcttttgattcacacacccttttgacatctgggtttccctgaatcatatgcaatctaggacttacgcagaccactccagtttcacttacgaaatttgggttagccaacttaaacagtcatggctgtaatttgcttctgagttaaaatgctattattattttatgttatttatggattcctgcaaaggagaaagcatttttattttgataaattttgttattaatgaaattaactcaattttgtagtaacatagtatacagtgaaaatgtgctttacgagatgccgtgggcttgtctctcaaatggacaatgaggctttccgaaacctttgtgcctttaagtttaaggaattgatttggcgtcttatctcagtgtacacaaagcttagttatcacctaggaaatattggatgtttgtctcagggagaagagacaatttttgagaccacaattaggttttgtagctatttgacatccaattataatcagatactcagtgaaacatgcattcataatgcaggccaatgatcatatatttggcttagcttttcactagaaaaattctttaaagaaatattgtccttccaattttagtggtactgaggaacagctctggttataaggggggaaatactatatgtcctttgttcaatcttactaatctttattaattttatgattttccccatttattttttaaaaatcattaataaaattatccttgattgagtttctcctatgtgctaggcattgtgataggactttagtaaacatcatctctaaccctttcaataaccctgcaaggtagggtcatattttatagataaggaaactgaggctcagagaagttatgtcttgaaattatatagtagcaagtggttaagccaggtttccaacacaggtttgtctgactctaaaaccagcatctgcccccatctcctcaccattcgcgaccagaatgtgatgcacgtctaccaaaaagagagtagcaaaaggtgatttatagaagcagttacagtcctctgaagagaaggcaaaactattggggatagggaaaaagtaactataaagatcatatttatataatcgaatattaacttaatggcttgaattaggtggcaaataaaatatattagcaagcaatgttacaaaccatggtgagagctatgtagtagatgaagcagaatgatggctgggctcagggagctcatacatttggaacccagataaatctttgctccttcttcccagagcccatcatcactttttaaaaacacgtctttgctgggctcagtggcttacatctgtaatctcagcactttgggaggcaaggcaggaggattacttgagcccaggagtttgagaccagcctgggcwacatagggagatgctgtctctacaaaaaataacaaagaacaaaaccatctgaatttcatgcattccaacatatattattttgttccattctacttaataacctttacactagttgtgaaactcactgaaaacaaaggagaaactcattataattcatctaaacattcctgaaatatcactttaatcaaaaaattaagaaatattgctcagatttaaaagaaaaatggaaactcccttggcaagtgggtttgaggtttggtcattaggttttgaataatcaggagctatgtgttgtagtaggaaaagcataccatttagagagagacagctttagtttgtcagtcctgcctcttaataggtggatgaccttgagtaaagcatgacgcagcctttgggcatcagtttcctcacttaaaggtagaagggttgaaccaggtgtaagctgctgttcttccatgttatgattctaaatagttctagatggaattatgttgcacatttcatatgttgttaaacagcttctctctggaacagttgctcctaatctcctaataagcttactatgggtcactcagcaatcttcaagagaaacaaacattatttggttggtggataccaagacaattctgatgtgtttgtgtcaaagattggtcagatgaaatctaactagacatgtatcattccatcatcaagcgaaatgaccttgactctaaacatcttaatttgaactgtagacatttcccaaatgctttagggtagatttggaccataatacactccactgtaaatggagaaagttcatcatccccataataattgcccccaaactgctaggtaggaatgcatactgggtttagtatgtattaactcccttgtgaattcagcttttgagagcagacctcttaacaagtcatgagtatttagagtgaaatatttaattcttagtgatactattttcctattctgctattattattcagctatgattattttccttctcctcccaacctcctatttctttttctttattaaaaaaaggagaggaggtgcatgctgccatctggggtgaatatgggcttcacgtggggacctgggcgctggttctgatccagagagtgagctaggagcacttacacaagagggtcttagccactgtgtcgggggaatagccttatatcaaagactgaagccttttagtaaaacctgaagaataatcagaagcagcattgactagtctctaaccttggttgagggacacacacacacacacacacacacacacacacacacacggctctgaaagctcagacacggaggacacgctgtgatccacttagccctctcttctccttcagggggtcccttgcaggacagaacgctaaggaacaaagtcttaactggcaagctgccggcagaaggagactgtctggtggattgcagcgctgattaggaacggggagtcctttgcgtttcagaatccggtccacattttgctgagagcccaggcactgtgaataagaggagcctctgaggactggtttctgatgtcgcactaggcatgataagaatgccattgacgtcagcagagtcatcatcagggagaatggcaccccagctcttgaaaccacaccaagcaattgcagtgcttttgaaaattaaaagccggtgctggagtgtggggggtgaggtggggggtgggggggtggggagggaaagaagcaaagagggaagtcgtggctccagctgaactcttctttcttctatgcgtttcctgtattttaaaaaggcaggctcacggccctcctgtgcacacgcccgctcactcacacacactgctgcctgggctcattaacctaaattgggggaggtgggggaagaagaaagagagaaagaaggaaaaaaattaattctgttaacacttctgcatgcacataaaacaaactgtgccacccaggtgctggacagaggccctgagccacataagcctctgagaatcaaattgctgaggtaaaactgatatgctttaaatgtgtgttgatgaagagattacaagggaggaattaaacacttcaaaggagctactacaaagcaacaatcactcttcccccatccctcacacacgcacattactgtggacgcttgcatgtttgtgtgtctgcctgagaaaatggcaaagttggtttaggaagggaacactgcaggcatgttgtgatttcagctttcacaggcagctccaagaacatcacctccagctataattcaacggttacctggactggaaaatgtcttggaggttacgaagtctttgaattctttagtgtaaattgtctccgctttgaaattccacaattgatcgaatcctttcattctctttcccactcctaattgttccactctaactctccacccaccgccaggaatatgaaaacaacatagagtagaactgatgatatcagctgtataacacgctttattttacggcattaatgggcagctttccaagtccataaaaatcttttgctgatctgattttaatatccatattcttcagttatactagaaagaatgatttccgagatgtggaaatgttagccgggaaacaaaaggacataggcacataaagcaaaatctggcaggaaatgtgggtttaataaattgaattatgtgaaactcctatttcaaatggactgatactagaggagcagccctcgagagatatgcacagtaatgattcttcgttttcaaagacctgtttctttttgaaaaggaagaagccctgaacagcattcctttcaaatacacaaaggtagctaaagtacaaccttctcctctttcctatttgttctttaaaaaattgtaaaaattatattaagtgtgcttcttgtgatagagtcaataaagggagaaggagtttagcaaagcacatttactatatactcttaacccgtcttgcttactgtaataatcgaaagaaagatggctaattgtcttgcaggaatttgggttatcctctgaaaggatacaagtaaatttgtaacttgggtcgtattggctattttttgttctcttttgctttcatttttgttttgtctgaggtttataaatggaacccttctttcctttcttccttttttccttccttccttcttcccttccttttttcctttcttccttgctttctctctctctctctctctctctttttttttttttacaattgtacttaaaagaataaaggattctgaaaatcagttccaggatccaataagggcctagattgtatatcacaggatcagagccccttgctctcaaatttatgattgtgaggatgtattattgtatttgggggatcaataagcagagccagagccttcacacaaggctccttgtgccccctcccccgctccatcccatgaggttaaaaagcactgactttgactttaacactgtgaacaaaatacagaacaactgtttcaattcccttcactatttctgctatgtgcctagattagatgttttctgacctgtctccctaagttgttcctgtcacttgtgtctgtcattcgctcccccatcgcatcctgcccaaccctccctgtctatgattcgaattgctctctgtccagatcatttcctgcagtgaaaaacgaagaaagactttctcccttcttcccacctacacattccttttgtcccccaagatatcccttcctcttgcctggaatcttcccaggccttaattgattgatttaggccccctttgcaccaggcaccctagcggaagcccagaaagccccaagagtctggatgtgttttggagagcaggctcaggttcactgcacactaatttgcagcaggaagtgctaggaagcccgatgagggatgggaattagcaaataaggttggcagtcaattgacagaggaagcttaaggaagaggatcattttgaaaaggaaaaataatttaatccttttcaggtgtgttaatttctttcgtggaccaaattaccatggacctggaatagttgagattttccctaaggtctggctgtacttcatagggaagaagcaagggtaagtgcagtaaatttgattatggacaccagtctaactctagcttaatgagccatggaaacaaaatagctcaatctcttctaactgctgtaatgcaacactaggagcattgagagcactgtggttttggttacacaaatttgtagtacaggccttgcctcagcatttgaacatttcagcaagagagctgaacttgcttcgttcttcatgtagcagatataagtcttttggaattaatttgaaaaaaaaagaaaagaaaagaaaagaaatgtacccagaaagcaagagatcttaaatgtatccaaaacctagaacaaacaaacattaacatttgccataattactgtgggtgtttttaataaaaatatatagatagataattttggaggttgcatttccccaccatcactgccagcctcatttttcttccatcctctccagaacaacctctgccataaatttaggaaatagtcaacctgttcacattttcatctttttactatatatgttcttattcacaaacgaatatgttgtagttataaaaagtcatcagtatcttttagcttatttttttaaatgcaacattatgtttgttggatcattttactcttgtcccagtgcaccctgtaattcccatgaattgacaggtagcgatagatcagcagtagtaaagtaactgatatgggtaggttaatagaatgacccttttaagaagggatctcaaagagggaggctaggtaagctacaaaattatcagggcgaaatgcagtgaggtagaagtgaaagcagcttagagtcagcctgggctaagataaatgaggagtggagctgcagctggaggagcaagagaatatggtctactcgagtataaatcaagcttgctggtgagcagtttaggactagctcctggttttacagcaagactttttatgtgatcttgaccaaaccactgcacttgattgctcctttctactccttggtcctcacgtgtcaaataaaacccctgaattgcagagccaaaatgcaaacaaatagaactcctcactcaacctccctcagtttataagtaaggaaatgaagacctagtaaaacattataacttacagatacctgtcagggcagaaccagaagctggacttgggctaggaaaagttgttcccccctgattacattttccaaaggttataccttttccacagtttctaaggtaacatgttgattgacttgacagttgtagaaatattaggaagtggtataaagccaagaccatgtttactaaacagtgctgctcttttttttacatcatacagatgagaaagctggtgctcagggaatttaagcaacttgcccagagtcacgtagcttagaagtgttagagccaagatktggaccccagtctttctcactttcacagacttgcttttaaccactgtgttatgctatgctgcctcagtataagctcctttcaaacaaaccacttccagtctctgacatgcaagcccagaagttttcagatttacaatggcatactttttttctatctgctaagtgttagatgtcacggtgtctgcaatggagtagagctttagaaatgaggataaaacatttggtttgatgttagtattaagaactccaatatccaaggcaggaaacttggtaattaatattttaaatggactggaggggtcacaggtattaaaatcaatattttgatggcaagataacaatgtaggaacaaataattggagatgtttagcaaaattatgaattaagtagatgtataaacggcagattatgaaagggaaacaaagattacctgggaagagttttgtgttttagtcaactgaattaccagaatgggcagaaaaaggaagtatcaaagaagggtctgctgatagaaaattaaataaagaagaagatgccatggaaacgtttttagtgcaaatacactattgctcatggctgaagacagaaagaagactatgtgtgacttccagatgaagttcaggcatagaggcagggctaaataaacaagcacatagacccgagaattctcgttgattgatctttggaaattcggtataaatatgatcagttcaaccatgccttagctactggatcaaaggagacatctaccggctttgggagataggaatctggaaaattgacagactgaaaaaaccaaaaccaaagaaaaaaaaaaacaaaaaaaacagagaatgcagaatgccattttaaaaaccctaagaggctgtgtctgatgttacaggactctttgactccattagtctcaattctaatatttaagttaagtgattgtgggcatagaatttttttcaaaacctgtttcgaaatgaaggcttcccatacattgaagttaaaagtggtcttgagaaaagaacttcttaataggtaaggggttttactttggaatgttgaaaatgtttggaactagatagaggtggtggttgcacaacattgtaaatgtgctaaatgccactgaattcttgactttactatttttaagtttatgtgatatgaatttcacttcagtaaattatctttgttggtgcataattactgtatatatttatggggttcatgtgatgttttgttacatacacaatatgtataatgatggaatcggggtatttacggtatccatcacctcaagtatttatcatgcctgtgtgtcctctttctagctattttgaaatatgcaatacctgttgttaactctagtcacctaatctgctatggaacattagagcttattctatctgtgtgtttgcacccattaatcaatctcttcatcccctcccctcccacctacacactcctcccaggctctggtatctatcggtctaccttcatgagttcaagttttttagcccctgcatatgtgagaacatgtgatatttatctttctgtgcccagtttatttcacttaacataaagatctccagttccatccatgttgctgtaaatgacgattttattcttttttatggctgaatcatattccattgtgtataccatgttttctttctttcttcctttctttcttgctttttttttttttttttttttttttgagatagagtcttgctctgtcatccaggctggagtgcaatggtgccatctcagctcactgcaacctccgcctcccgggttcaagcaattcttctgcctcagcctcccaagtagctgggactacaggcgagtgccaccatgcccggctaatttttgtattttaagaagagatggggtttcaccatattggccaggctggtctggatctcctgaccacgtgatccgcccgtctcggcctccaaaagtgctgggattgcaggcataagccactgtgcctggccgtataccacattttctttatccattcatctgttgagggacccttaggttgattctccatctttgctattctgtatagtgctgcaataaacttggggatgtaggtatctctttgatacaccaatttcttttcctttggataaatacccagtagtgagattgccggacatagtggttagttctatttttagttttttgagaaatctccatgctggttttcatagtggctgtactaatttacattcccactggtgatatgtaagagttcccttttctctgcatcctagccagcatctgttattttttttttattttttattattttttgcatttttaataatagccctctaactggggtaagatgatatctcattgtggtatcaatttgcatttccttgattattagtgatgttgagcattttttcatattggacatttgtatgtcttcttttgagaaatgcctatttatgtcctttgtccacttttaatgggattgtgtgcttttttactattgagacgtttgagttcctaatatattctgaatattattcccttgtcagatgagtagtttgcaaatattttctcccatttaatagattgtctcttcactctcttgattgtttgctttgctgtgctatacagaaatttttagttcaatacagccccatttatctatttttggtcgtgtggcctgtgcttttgaggttttagccataaaatctttgcctagaccaatgtcctgaagtgtttcttctgtgttttcttctagcagttttatgtttaagtctttaatccatcttgagttgatttttgtatggtgagagataggggtctactttcattcttctgcttatgggtgtccagtttttccagcatcatttattgaagagatctcctttccctaatgtatattcttggtgcctttatagaaaatcaaatgtatctatcattatgctctctgtctactctaaatctatcagtccactctgtaaaaatgtggatttgtttccaggctctctgtattattccattggtctatgtgtctgtttttataccatgttgcttttgttactatagcgttgtaacatatcttgaagtcaggtagtgtgatatattcagctttgttctttttgctcaggattgctttggttagttgtgctttttttttggttccatagaaattttaagtttttttttatttctgtgaaaaatgacattggttttgatagggattgcattgaatctgtagattgctttgagcagtacaataatttttttttttaaagagaaagggagaaagaattgggcactaagtacatcagagtagatgtttatcaatttttttaaaaatggtcttggctaccataaactgtgatgttcttgagagcttacattgtgtcttgttgattttggaattgttgatactcaaagtgcctgacacatagacttgattcatatgtatttaatcaatgaatgaatggataactctgacctcctcttagtgaagtgcacgtcatggggctaccacttgactatatgctgtgggatagatcaaagaaaggtaggacacaaccttgaacaaaattaaagtaaccttcagcttgtttataaaaagtgttctggtggagaaataatgaatcttttcagattttagagtgttgctgatttgatttcaatttgcatttttaaccatcagtctctgtggaactttagtttataggtaggacttttgattgagcttggtggctcacacctgtaatcctggtgcttcgggaggccgatgtaggaggatcacttaaggccaggagtttgagaccagcctggggaacagactctactaagaataaaaaaattagccaagcagagtagtgcatgtctgcagtcccaactacttgggaggctgagcctggaggatcccttgagcccaggagtttgaggttacaatgagccatgatcccaccactgcacactggcctatgcagcagaacaagaccccatctcaaaaagcaatgacacacagaaaaagcagaattttaatttgttctgctcttgtctctagcacttcatatccatttctctgaatatgaacagtgggaaaggtagtggaattgaaatggatcatagaatgtttcctctactgataatttttactccatttggagtatgattgaagagctaatgtcaagatgcacagcaggactcaatgattgaaaaatagtgttactgatgtaaaagtcaccatattttaagctttctttatgatagtcttccattatttcctttgtcatattagcaccactggaaaaacacaagttatacgtagggtagaaaatgtaatgacaatttggtgttttataaacaataataaatcagctttcatgaaattaggctatgtcctctgctctggtgttagaacttacttttgcctgagctcactaaataattatttcaatttcccagataaatgtacttctgtggacagaggccatatgctggtagcccctatacaatatatagagagcataaatttcctcttctctcttggtatttaaaattaggatttttataaaatgcattttattcttattttgccttctccatcattagaaagattcctggatctgtaaaccaaaaataatagtaataataatgataataagattttggcaatttaaagagaaattcactttcgtgaatatggtcacgccagctatcttttgaaccttaaaggaggcaggaagaacatttgaattaagaattttggagtattacaacctcatttggttctcagaagctttttttaatttcatcttctccacgccagtttatacaattctctcatgcctcactttacttttatatcttttcttaaaaacagtttaaattgtatcctccccaccccactttatacaattctctcatgccttactttacttttatattttttcctccattcttccttgtttcattcattcactctcccaagtcctctggcctaagttttatttgtgtggtattaagcagagaccaacagaacaactgtgaagacttcttggggataaaccaggtttcacttgaattgtggtgcgtctgccattggtgtggaagcagggcagaaagaggacagaggcataccagcaagtacagacatctaaacacaaagagaggagaacaacctcagggatactccctcagtgcctgggaagaaagcaaaacttaaagtgctcatagaattgtaaataaactctctcctctttgaaatttatgttcgatggttgctgtgtagttgcaacagtgtcataaagtccatgaggcctattttttttgagtaatcaatattgtggaaaagtgctagagcagacctaccttatataaattaatttgtttgaattgctctattcactatgaataaatatttattggagtaccttctatatgctggggacctcagccatgagatacgcaggtggaaaaaataacacttaagcagcttattgtatagcagagaggtggttgaattgatagacaattaaaatacaacgtgttgaaaggcctgttaaagccacagggtcactcagtggcaggagggattcagtcagcctgggccagccatggcaagtaagtggcctttggaaagttaccaaggtaagacatacctgatacgttcaagaaacaattccaaggttcaataaggccagaagttaaagggcaatgtaagccctggaaactgaggctagaaaggtagaaggatctctttttaccacacactgtgccgggcaccatgaagaatacaaaatagctagctattatggagcctacactttaatgtgtgtacatagatacatgtccatgttggaatttaactccttgagaggtcatgaattacttagtcccggaagcatttgaatttatactggaaagctatagtagagagttgacaaaatattttaaatgtagtaagaagaatttgacaatctattgtgtggtatgctagcaagccagttctccttcctccttttctcaccatcccaccacccctcacaaaawaaaaaaaaaaagttaaaaacctgatctgcagtgtttgtctatggccatggtgcaaatactcctcccatggctggttccaagctaccactggttcaacagttcttttgcagaattcttgaatctttaacacttaacaagatccagttccagcatattcctgcaacagcgattctgcagttctcaatgtcaaataatagaaccaaaaagtcatataagtactacaaagaagaagagagagttgagagccagcttagccaggaaatgctccagggggaagtaaggcttgagttgggacttatagataagaaatgtaaataaaaaggaacaaacactcccaccgtgatgcacaaatattggatcatgtatgtgtgtgacaagtgtggccgtctgtagtggagggtccaggtaaaatttaggccatgaaagccttggtctgtcaaactaatacattttgttacattaaagttagtagacagccattaatggtttttaaaaacagatggtcatagcaatgttttgacaaaagcaatttttaaggaagattttgtttttataaaaagttgaattattgatagcagtgagaccccagaatagaataagagacctgcctcatgtaagtgagagtaattcaattcagcagtaatcttggaaatttgtaacttctgtggtgagaaattgtatcctgggatgttgggtaaagccactgtgaagccaaagaaattagtggctaaacgtagagaaattaagatgaaggaactggcacatggagccactgtgtactataaagtatttttattggtatttagtcttgctgttattgttgctaatgattgtattgaataattaccagctgttgttagttatttgaaattaggtgcctaaagcaacctctcatcttgcagaaagtcatctttcttgaaactttttaaaaacttgcttgaaacatggagacttggaatgggacgtctatcatagtagcacatctgaaatccttctcattcctgctgtcatttctgtcctttcgcagtccactttgtcaccacccccaccattccttgttctgcctgcaatccagctttccagtcactttctctacttcttgcctggctgcagcgtcatcatttaaacagctctgggttggtatctcctttcaccagaattcctgcagccgtggagtacgtgcagagcatcttccttttgaccctcttaaaatgctgaggggtgtttccgacacacattgctttgtaattcaataatagggcagttgtgggttctttttattgcagttatgctgatttttaaaagcactctgagtaagaaaggaaaggtagtaaaatatacgtgtacctcgatgctcattgatcacgtttgcacatgttcttgccaaatgttgtttttaaaacctgtctctgcaggtctgagctgtgaaagtttgggaaatcagggtcagaaggcaaaaaaaattcgtttgtatcatcgtcatacaatataaattacatgtagcatatacatagaaaacaatccaagggatgagcttcctggaaatcattccttcttgtttactctgattatataatggggaattgtatgctttatacaattttaatttcttgaatatatgtgctcaaaaaacattataatgtggttcagtactatatatgctgaaaacaggttgctaatgaatttggacaaagattcccattttatttcctgtacgtttacacattttttggctgtatattatatttactatatatatttattaggactacagcaaacgctaattcatcgactgagataagaaatgtgttttccattaataattataaatctgccagaagattgtgagatttacattgttggggatctaaacaaccaaaatcattgcaaagttattttaaaactattattaattatttatgtaatcatagattatggcttgcagaagactgaagaaattgttcaacaaaccatgtaggttttgtggaagagcagtagactttgataagtaagctcagagtggtccattaaccttttctctatatgtacattatgtgttgataagcatgatatctattatacctcaattattaataacaatatacatcctaactattaagaacttagcctgcaaccctaatagtgtcccctttcttctagaacatagatcagcataaggaaggaagcaaaggaggtctctaagcactcaaaatagatgttcacaatgttcactcactgaagataatgtaggtcattagccagagaaatgtatgttcatattttagtgatgattcatacaagcttggtcatgtggttctaaaccttctataattggatgaagcaaattaagaaaggctgggtaggagatttcagggaaagtcacaactgatattagccaaatgtcagctgatggcctgaaaacaacaacagaaaaagaaaatctacaaaatcatttgaaaaccacagacatagctatttggggcctttttgaaaggggcaataagctcaacccatctttggaaacactgagcgcatcctgtctggacaactgagtataatttttggtgttcaaactgatgaccccaaatcatcaaaaaatacaaaattatattttgctcaatctgtattgctcttctatattatggtaagatttctgtttagtgcacttaaaagtaagactacccccaaatttaatccccatccccttcaatgtctcctcctggacattgctccatctatcgccccttctccctctttctttgacctactctttgatggctgcatctccttcaaaactggttgaagttcctaaggaaaaaattcccttcctctttgatcctgtatcttccatcagttattaccacatatctctattgattttcgcacccaaacttctagaaagtttacacttatcattttctttttcttttccccccacttattcctctacccccttgaagttagcttgcagccccaccactctgttgcaactactgctgtagttcctctgctctcccaattgccaaaccaagtagatatttttcagttcatttctcatcaagtttctctaagtcaattgccagtgtatccctctcaaaaacctttccatctttgcatgaggtcgtacactctttcttttcctttccccccacccttcctttgacctggggttcccaggatcccattctccattcctgctttcctcactctgtgtgtcttccaagactgacttgtgcattcttattttaattaccacctgtttgctgaaagcccctaaatttatatagaaatccatcttaacctcttctgcaaagcttggaaccccaatatttattggaaattcccaactgagtatcccatgggtttataaaattcttcatatccaaaaccaaatttagcttttcctctaaatttgtgcctccttatatatctcagttggtgacactacccagctatcatgttcagaaaataaaataaaaatacgtcataaaagcatcaaaactctataaatttatccatgtaaggattgccaccattaatatatactttaaatccttccaaatgtttgtatacttgtatatatttaaagggatcatatttggtgacttactgctataacacatttttcccatttaacaaaaaaaaaatttttctgcatcaaagtatacttcaaaattatttttgtagttgctcatgttctagcagttatttaactaataatgttaaacatttacatcatctttgcaactttatttctcttgttgcttttttcttaagaaatgactattgaaaatgacccccaaaagggtatataatatcagtgataaaaattagctcttggaaagggaggagagaattttctagtgtatggtagtagcagtaacagtggcctagttacactcaatatctcaatatgtaatgccatttatggacagcttactatgtgccacactctttaaggactttgcataatcctcaccacaaatctgtgagattggatacattattgttcttatttcatagttgtggaaactgaggcccggaggagtgaaatactaggccagggtcacacaagtagtaagaaacagagccaggagtccacctttggcagtctgtttccaagattggtcacctaacacaatgcttatctgccttttgttgtaccctagggcatcctttctaccagagtgtaccacttcgctttatgtttcttagaataaaaccaataaatagtgcagttagttagctaagttttcagaaattttgatagatagtgtctagagaaacaaaaaagacacaatttctaagatgtagtaatgaatgtttcattcatgtcggtgattattttgatttgttgatgtgtttttgataacagagtaggcaaaaaacataccatcaatttaataatggaatcctaagtttaggtttaacatgatttttgaagaagaatcaatgtgcaaatgttgatgtattttcagagttatggttcagaaatgtgaattattcaaatctcatatcagaatctaaatttttaagaaaggaataatagaatatagtaggtcccctaccatcaattctacttctgtacccctattttatcattcatatttggcttgctagtgaagatgccttgtatctgttgtatcactgggtataatgtctggcatttgcaggtgtgcatgcaaggaaggaaagaaggaagtgagggaaggtggaaggaagagaacaaggagggaagaagggaagggtagacactttgggaggccaaggcggttggatcacctgaggttgggagtttgagaccagcctgaccaacatggagaaaccccatcgctactaaaaatacaaaaattagccatgcgtggtggtgcatgcctgtaatcccagctactcaggaggctgaggcaggagaatcgcttaaatctgggaggcagaggttgtggtgagctgagatcgcgccactgcactccagcctgggcaacaagagcgaaactctgtctcaaaaaaaaaaaaaagaaagaaaaaggaagagaaaaagaaaaaaggaagggaagggtagaaagaagagaggaaggaagggagggagggttgaattatagatttccccaactgcctcccacacaatgtgctctaaccataaattcttcatctcagttgctcaggccaaagcttgagaatatccctgtgtctactctttttagaacatctcgtatctaatacattagaactcctgaagcctctgctctcaaaatatacccagagcccagcatccttgtcaccatctccatggttaccatcctattgcaagccaccatcttctctggcttggatgattgcagtggctgtctaataggagaccctgcatctcctcttgctgcataacagtctattcaaaagacagcagtcagtgcaaatcatgtcattcctctgctcataaccttgcaatggctcccatttccctcagagttaaaagtgattattgtggcccacaacgtgtagcccaatttgacccctgtttcatctctggtcttctttttaactcttctttctctcattcactcagctccagcccattagcctccttgctgatcttcaagcacatcagtcacacttccattttaagaccttggtgctgcatgaagtgctctttcccccggtatcttagggccaattccattgctttaagtctttgcttgtgtttcatctccattaggccatccatgaccatcccattttttaaatgcatcgcacattaataccattcccaatgtctgctctattgtatgtatgagtgcttgtttcatagcatgtctatccttctaacacataatttactatatctattgtttattatctctctcctgtactagactggaaactaccatgtggaacaatcttcgcctattttgttcactgatacagatatatatacacaacagtgcctcagccatgctaggttgctcagtacattcttgaataaatgaattatcgatgtactcagttctgttacacagatgatttggcttctttggtttcccattaagagccttgttttctttgccaaataattgaaagtttcactcagaagataaggaacatcaaagacctcaagctttgtggtcttggaaagctgtggctttggtctctgtctcattccccttgggatttagaatagaaaaatgcaggtggagaacacattcaaacatcccacactttatcagtattttaaaagaaagaaagtatggctttttttttctcaaaacaatgtcttagttataaactgaatttgtataaatggccagttgtacattagggcagttgcacaatagaaagcatccagggaacaatcataacctcaagagcctattggaaagtgggatcctaaatagctttctatgatctccctagaaaactgtagaatttccccagagaataagccagcattttgttgaccattctgcaattccaggatcatgcttgcatagtcatagcttggaaggaggcaaattgaaacaagttgaaaatctgcaggaactatccccagtgagaccacagaaaagccagaagaagaaaaggtgggatttggggtagagaacgagccacttctcactagtttgcatgaagcattgaatatcccaagggagaaaacattgaagttctatgagacaccaagaaaagtgtatagattatcacagcatatggatagaggtcatttgttccctccctccctttaaagaaaagtagctttgcaagccacagtttaggaacaaatggactttttgacatagttcaaatcctcctgggtgtggaggcattgacaggagcaatgtcataaattggttaaaggttgcagtctggaatcaggctgccctgaatcccagccctgccatttactagctgtgagaccttgtgcttcctaacctcagttttcttttcttttcttttttgagactgggtctagctctgatgcccagtctggggtgtagtggcaccatctcagctcactgcagcctctgcctcctggactcaagcgatcttcccacctctgcctctcaagtagctgggactacaggcatgcaccaccatgcctggctaatttttgtatcttttgtaaagatcgggtctcgccatgacacttaggctagtctcaaactcctaggctcaagtgatccacctgcttcagcctcccaaaatgctgggattacaggcatgagccacggtgctcaactaacctcagttttcataatggtaaaataggaataccgatagcacctcccttggtataaggattaaataagataatctacatagtgcttgaaacaatgcctaggcagtgttcatcaacagttagctgtgtgctgtgtacatgctggagctgctaccttgtagaaattttaaatttaaaatggtgtgtagttggaggttaggagttactaggggtatcgcctagggaaagacagttggttacccagacaggtccttacagagtagtgttttccctggagaattaactatattccagaatctgtcctcaaccaagcagtctcagaaaggtgatcttgtcacagcctctgagtaagctgattcaaactctcaaaagctcacaagagccttaaagccagagtatcagctgattccttaaaagctacaaagtgttttggccttgccaacatacgcattctccctcttatgggtaggtttagaatgctaaatagtacataacatggatttagaatagacagatttacatatgatcagaaggctcagtggtcatagttttgagggcctaggacatgcatgtgagcagtagggagatcatcacaggaggatgggcacactctcgaggctcatacaggcgctccctctctccatgggcagcacaaggcaagtctcctttgtctttgatttacttgccaaccaccctcattctaatgggaactttctttttccaaatatgttaacaccttcaagtaattactgtcagcgtccagcctgggagtctcttggacacagtttttcataactctagatggatctcataatttgcccctgaaagatggtaaataattttacttctcttacttctggactctaagggggatacttcactcttgctccttgacctctcctctctagatcccacaagccaaaaattgttggaaaggattaatatgagctgggcccaataggctacagcatgcaccagcccctaaagccagctttaggattgggcggagtgtcagcccagcttccaccccacttggcttattcagcgacctcctgcaattgtcctctgctagcccttggcagatcagaaatgttctaaagattgacctctattactttgggctttccttaacttggcatccatgaaaagatccacttaaatgctccagattcagtgaagtctccttatcagagcttcttatagcacccatacttttctttctcagcatttattatgaatgtaatcaaatcatactttgtgcatgttttgttgtggttgctgtttaatgactattttgtccatgaaagaaggaactgtgtttgttttatcactggtttatccaagggactagaacaatgtatggcacatacaggatttaacgaattttttttaatgattaatgcccctttagatagtgtttttcatctgagtgcctcaacttctatgtgcattatgaaactgatatagtgggtcacaactatcagtaagaaaaaaagaactggaatagagtagaaaaagatgagaatgtatcacgcatagggaataacttttataaatctgtttcagtatggataggcaggcctacaccacacacacacacacacacacacacacacacacacacacacacacacattgagttcctatgaatttgttttttttaatttctttcttttttttttttgagaaggaatctcactctgtcacccaggctggagtgcagtggtgcgatctccactcactactgcaacctctgcctccctggttcaagtgattctcctgcctcagactcccgagtagctgagattacaggcacctgccaccatgcctggctaattttttgtcgttgttgtatttttagtagagatggggttttgccatgttggccaggctggtctagaactcctgacctcaagtgatcggcccgccttggcctctcaaaatgctgggactacgggcgtgagccaccgcacctggccaatattttttaaggtaagaattttgagaaacactgtcctaggttccctctaaaaccgaagatatcaccctatgttcagccttttagccctaatccttttcttaatcttccctatgaccaaatattaccatgcacacatgcacacacatacacacatgtgtgcacatacacatgtacactaatccatctaaagtgctactgttaaggaggagcaatagaagaggtgattcagggaatggtttttgatggttatttacttttataatagtttttatttgtaaaaagaagaaacctagagttttgtatcctaaacaaaatttaggattaggatacaaaataataaaattcaaaataagtcttgactagtgagtgtagaaggacagtgctacatctgaatctccagttgggtttacgcattttgtatttatcaaaaggcagtagtgatttaaaatgttgataaacactcagtttcagttttctattgctgcaaacaaactattccagaaagtgatgtcttgaaacacaaccattctattttgcagtctgtgctgggctcagccgggcagtcctgctggtcttacccatggtccccaatatggctgcagtcactccagtagactggaggctgggcttagctgagatgacctgctttctttctttcttcatgtagtctcatggcttttctctctctccatgtggattcctcatgtgaactctccagcaaggtagtcagaatttcttccctggcaactcagggctgccaagaacacaaaagccaggctttcttaatgtttaagcccagaactggcatgtggccaattttttgtgttctgttggttaaagcaaaccgagtcaagaagagcctacacaagtagtaatattacaagtatgatgaaatatcattctcttcttagaccaaacagcatattcctccctccactcttaccctctataatgttttgcttttgggagttcctttatatgaaatgcctcccctctacttctccttctactgaaatcctactcatcctgaatccagctcagagctaactcagtgatttccttcatacatctctattatctcatcctggaaataatcactcctgccaggtgcagtggctcatgcctgtaatcccagcactttgggaggctgagacaggcagatcactgaaggttgggagttcgagaccagcctggccaacatgatgaaaccccgtctctactaaaaatgcaaaaattagccagacatggtggtgaatgcctgtaatcttagttacttggcaggctgaggcaggagaatcacttgcacctgggaggcggatgttgcgagccaagatcgtgccactgcactccagcctggatgacagagcaagactccagctcaaacaaaaaaaagaaaaaagaaaaagaaaaatgccctcagcactctcatagcattatgtctatatttcatattatgtcttgacatataactttacacacacacacaagcacacacacacacagatgtagcttgcttttagattttaagttgcttatctaagattgggtgatcaataactgtttttttcaaaaaacattaactggttttctatgacttttaaatgacagctctaaataattataatttctcactagtttaaaaaggcaggtggtgggatattcaaaactattggagaaaaaaagctgatgtatgctaccagcataaaacaacaattgccctttacatcttcagaaacccctgtactgtgcagtcattttcaaacctggatttttgtcttgtgttttttccaaagtagtatatatttaactttgtaaaatggtgtggtgttttttggttgttgttgtttttgagatggagtttcattcttgtaccccaggctggagtgcaatggcgcgatctcagctcaccgcaaactccgcctcccgggttcaagcgattctccttcctcagcctcctgagtagctgggattacagtcatgcgccaccacgcccggctgattttgcatttttagcagaggcagggtttcaccatgttggtcaggctggtcttgaactcctgacctcatgatccaactgcctcggcctcccaaagtgctgggattacaagcatgagtcaccacgcccggcctaacatggtggtttttttcctacctaatatgaagatacttaatgtcttaccttggaaaaatatacatttcaaccagtttatattttacagaagtgactgagaaatcataagcctttgtgcaataacatcatcagtcaaacacataagcagattctaatctgccctctctatcaattagtcttaaaactacaagttgttcctctataccagctacacatgtgcattggtagtcttaaattgtgatatgagcccttaggtagttcacacctttccaaaggaagctcagtgaacttcctgaaactgtgtaaagaattgtgtgtgcagtatgtgcatgtacattatctgtatttttctgggtggatgatccagtatcctcatcagagtcttaagtttgagaaacccaattatatattagttgtaaatctgtttactttcttagaattcttctcacattaaaactaagattatatttctatttcataggtaaccaatttcttctggagcaactggacacttacacgaacacttccatctgtctttcatctttacattttatttctaggtattactagtgttaggtcacactccctcctatggggagattctctatcacatctctagaacttcaccaatgcaagccttcttaaattgacccactcgctactgagtctgacccctgggccagtcacatcggtgcttgttagaaatcagaatcttggaactaaatcagaatctgcaatttaacaagatttctaggagtttccacagcatatttaaagcttaagaagcacaaagctggtgcatctaataccccactttctgctttttaatcttgcaggatttatgttttaaattctttataatactattaacaattatcatttgatttctattttcatatcatctgacagttttgattaaatcctttaacctcaggatttgtaaggggtaaggggagtgggttaactaactgatctgattatcaaataatgctaccattcaggacttatgcatagtttctgtgattctcaatagaatttgatggtacctacaacctctactccttgttttagtgtctatgtttttccactgtgcttaaaaacatttaaagggagaggctggaaaattattttaagatgaatactataaatgaaataactaagattagaaaaggcaatgataatactgaattacattggaaaaattcagtttacaaaactctgaaaagttcctaaggcagaattttgctgccccggtttctcataatagacccagcagttctaagttaagcacacatctttttggctatatggtgtatataccagactatcctttttctccaaaatttgactttcatctcaaagagtttaaggaatttgtgacttggtgcgtttgatgtggcacagttccacatgtgagggatggtgatttggatagcacgacagaagtacgtgccaagaataattggcttctgtcttgcggaacagctcaaatactatgtgtatcacagtatgtaatttgggtgtacaaaatgcctgtagttcaaagtgctttactcctctgcagtggcaagctgagcttcctgttggctgattccttatgtttgcagtaaacaggctgggtgcagttagaaagaaagcatccatctagtaagtgcattcacatcatccttcaaatgccataggccttagctccaggacattttctgcctgtctccttccctccctcctttctttcttttcctctctccttccctctttcctttgttccttctttcctccctccccttccctccttttcttcctagttccccctttctttcctttcttctattgaataaaacgcaaagtaattctttttctacttactttgattcttatcagctttcttaagcagtttccttgccgctgttgtgaattacatggggctgtggtaaaatgtggcacatttcaaggctatgtatccctttagattctggttcagtaagcttggaaataaataggagagcttacgcttttaactactagcctgcgattcgtataatcatgttagtttgagaaacactacagtaatcacacatgtaagggctttggagtaagatggaccttggttatccaacgcttactgtgtgactttggtaaattacctaaacttttctagccttggattttaatgtgtaaaagatagataatactaactcagtaattctttatgggttccatgagacaatgtatttaaagcacccagcatactatctggttcatagtttacagtcaataaatgttaattccattatttgatcacaatgtaagactattgaggtttaattttgattgttttttcaaaagtttgtaatctgttaggaacaatttctaaagtaaaattcagaaaacaaaaccatcaaaatttaattcagctaacatttttgaggttctatatagtctcgaacatatattatctaattcgattatcactataaaccctgtgtatagtagatattatcattcccattagtggatatgcaaaccacggctgtgggatagttttacatttagtaagtggcagatccaagtctagacagcccaggctggttctctttatactctgcctggcaacatttgccttcatcactgtctgttttcaaaagtaactaacctctacatccctgctcacacatacaaatagctctaaaggtacaaaataaagctaattttctgagcaattcattttattcaaatcagtctaatgatctgttccatgaaaaatgattatgtagctcaaaggtcttcaaactcgtctcaaaccaggggtcaggcagatcatattcacataaagggagaagcttgccagccagaagtcaataaagattcctgggactggggtgacctggaagctacaacctgtttaaaggagacagcttctgcctagctccaggctagtgctcaagtgccaggatgtgggctccctattgtcaaatcttttttttttttgcttttttaagactggaagaaatccaatatttaatgcgaaacttcccatttttgaacaacgtgtgtgggccaaacaagtcacatctgtggaccagatctggcctgaggattgccagtttgcaatcttgacctaattgcccttaattcttcacttctcttgacctggtaaatactccatttaaatgagtattaggtatgttctgggcccttttggactgggtctttgtaatatatacaaatttcaaagactgacctttagtttttcaggttcagaattgattttctcagaacccaattagatcaggtgctgtcactgacactcagaactcatgaactttatgcaagagcaagaacatgaattagggaattcacagtgagaaatatattgacaagtagacaggataccatattggccagatcagttcattctgtccttgtagttcagccccttgagaaacaaacttctaattagaagctgctttgacatatatggagtcagaaactaggaactgtagactttaaagggctttcctgcattgggttttgagattcttcctccttttatggtagtcttaacattcggctgttaagtgttatgctccccctccccaggcatgccaagtatatactgaccaagtgtcttctttatttagctaccatatgagtggttctcaaacccatgcccttgttaaaacacagattacagagccctatgccccacaaattctgattcagtacttctggggtgggtcctgagaattttccttcttataagttcccaagtgatgctgatgctgatgaactgctggatggggaaccccctttgagaagcactgggttcctctatcatcttcagctgacaggctttttcccctttgaagggttaccgctattgtctgtgtctctgctttaatatgctaatatagcattatggtcatatccagatcctgaggttggaacctgggtcttagaacaatttttaaattgtttatatttttaaaggtatttgatttattaaaactatttgattactttatttcatcaagtccaaggtgccattgattataaaaacatgtctggattttagaggcattaaaaatgtaggggccaggcgcgatggctcatgcctgtaaccccagcactttgggaggccgaggcgtgcagatcacctgaggtcgggagtttgagaccagcctgaccaacatggagaaaccccatctctactaaaaataaaaaattagccaggagtagtggcacatgcctgtaatcccagctacttgggaggctgaggcaggagaatcgcttgaacccaagaggcggaggttgtggtaagccgagatcataccattgcactccagcctgggcaacaagagcaaaagtctgtctcaaaaaaaaaaaaaaaaaaaaaaagtagggaaaaaattaacagtttcagaggtactgcaaattagtaaataaagcctcagtttggggcagtctcccctggattatgttgtatgtgtgtagctcaactcgatgggcacagttgaaggaaggattccctggtatgtttgttaaacaaacataaggtgaattttaagcctcccttccccaattcttagtggaaaagacactactggtactgtgtcctatggctgactttgtcgtctaattgaaatatcttattattgtatgcatcctctcctacttaaatgtgaccctgaaatgccagatctttcctttggaatgaatcttttttgtcttattggactggtagggctatgcacttaaaaaaaaaaaaaagttgattattagactcactgtttccttggccagtcaggaaaagatatttaggacaagagtttctcaattgtcctcatccagttttgcctttatagtgaatttcaataaatattaccatgcctatgtaagagggtgactggagaggcagaaattctatctgactgtccacttctaactctactattggaaaacctgctaggggtttttgtatttattatttttggaaaaatcattaagtggattcccttagctatataaacataaggcctgtcatctttttctttggagaaagagtgtgacaaaatttcccccttcttattaaaagctacccctcctcttggtacagtttgaggatagcgtggaccaaactacctaagaattcaggagtctaccaggagaaaagagactttctcactttgtcccacaattagaagtactgaggaaacccatgagaatggatgaaaaagggcagtcccatggtgtattgtcgggagagaatgctgatacggcgggccctagagggattaatgtatctgtgtagaggaaggggaaacctaagctgcctgctcaagaagagcatcttagattgttgagtgagggctgatctttactaaatgagttaaatcaaagagccgaactcttggagtccaaggctgggcatggagacccaaaccagcaaggacacaggtctggacaggaccattgttcactgtgataccacatggcagtggcagaagccttcataccaattgccgtcctctctacacctgaagtttagaagcacgactctgctttagactgaataatccctgaggttcttgggttatttgaaagaggggtagttttcaaaaagagagatattagatttcctattgaaagggcagccctggtctccagtgattaactggaaaaacaaaagagatataacaatttttacatctaagtactgtgctagcttctgtggatctagaatcaaatgagacaagatgtagtatgacaagcagttagactctcaagaaaatcattcaagtctgtttaggaaaactgacattcattcattcagcaaactattgagtagctcctgtgcatcagaacctgtattcacagtcaactgaaataaacacaatttctacacgagtggagttttccaaatagactaagatgtcataatggactgtgtgtagagtaatgttcaagttttttttgtttaagcttccccatcccccagaaaatactggatatatatagcaaaacctttcatggataataattgacatataccttggaggccatttggaatctccataaacgaaagaagaaagggcatttcagacaaagggaactacatgtacaaagtcacaggcatgtagaaaaagatgaatgtttcggagtaacttacagtatgtagggcgcaaacagaggaaacggcaaggaataagactatgtgagaaagcaagttagggcgaccttattaaaaagtttatagacagtggcgcaccgccaaagatgtagaaatgtggcttgctgtgttctgtattttggagcaatcactcgggtaccctgtgttgtgagtaggggtgaaagaagagaatcagtggaaccatgggaagcagtttgggagataggttggaaaaatattggaatgttctaagcatgacattgtgaaagaatgctagaatctttttcatatgaggggtgttatggaaaataaagaaagtattggccctgccctcaagaagcttggaacataaaagaagtaaaacatgagagcagggcctaataatgtatctcaaagtgctgaaggaagcatatgcattatagaagttctcatcctggactgtggtttgttgagaatgcagctgggtggagtctgaggaagtaagtgatggccataatcgaagaagagataagaggtaagagcaatggcttaaaagcaaaaaagcctcaaaacattcaaacttcctttgtataatagtggatgttattttgagaatgtcagtttcaggagataccataatcatgtgtttgtctgtatttaaaaagccaccaccataaaagatctagagtcactcatgaagttcaagtaccaatttttacccatgagtgtggaacattctgctcttttacaaacagtaactcgtactgtcacattttgcggcgcatctctcattttgttggttatttagtggccatgtaaacatgtacatgacttgtggtgaatatggtgattctcactttataaccaaagagggtggatgttacagcatatgagcagttatgactgtaaagcctgaagtgtgagtcacagggtctgacccaggtagtaagatgtgttatttgttcatgttggttagctgaatttcctgggctgacctcactgaagtttgctccagtaaagaaccggatctttactgatagatcaaggatctgaattctgcacctagttctttggctaaccagttgtgtcctttgggggaaatttcttaatctttctgctctccatttccctttctgtaagtaagggattagaccaaattccatccaggattgagaaattctatggtgtgacaaagactgctggtgctgactgaatatccttacagatttgttcatttagtaaccaatataataaagatgactgactgaatcttaattatattgggtgacatctgcctagtcaaaagattgcatttctcaggctttctaagagattgatgcagccaactacatgttagcagagggagctcctgcctagaagcactcacttttactcctcctcccgtttgtgtagtagtgatttggtgctggtgctggctggagcatcagtagccatcttgtaacctaaatggcagaattgagaatggaagccatgtgttacggatggtggatcagaaagataataggaacctaggtccctgataaacatggtgtcaccattccaaccttgacctgtttctagattattttctttacttttctttttcctttcctcttttttttttttttttttttttgagtctttctctgtcacccaggctggagtgtagtggtgtgatcagggcttactgcagccttagcctcctgcactcaagcaattctcccacttcagcctcacgagtagctggaaccacaggtgcatgccaccatacccagcaatttttttttttttaattttttgtagagatgaggtctcactatgttacccaggctggtctcaaactcatgtactcaagtgatcctcttgccttggcttcccaaagtgctgggattaaaggcatgagccaacatgcccaggctacattttcttaatatgagataaaaataaacctctttcttattgaagccattactagatgcctaattcactttctaactaacatattagcatcagattatctttatgtaatttccattgctaggttttctctttgcagtattggagacaatagcttaccaactagcttgggaacttcttagtgctattagagtttcaacacaatttaccaaatttctaaaattatttagttattggatatatgaaaacataatcaccatatgtgaagaaaaaaccaccaatgtttagtacaaaaattgggagggggaatattatattagagaaagtttattaatccagaaaaccacagaatttaaaaaatattggaagttgggaatttgggagttaaaggtacatttgatctttggttaatggcaagttcacattttataataggatgtaaaaccctatttctcactgcacctgtactttgatcttcttgtctgtcattgcaatgtgattatgaggattactgggtcactctcagcctaagatgtttttgtgacttaattttctaggagaggaaggggatcattaaaggatatcattaaaaggagagacacaaggcttgtaattgaccttccttgaaagtagtcccatctggaagattttatcagtaaacatttatcagtgtatttggcttttaagcagactcttctcctcttgtctttgaaacaaacaggcaaaggctaaaaaggaacacgttagtgctcaaagtttgcttcttgtgcatgctgaatgggaagaaaaataatatttaagaaaaaagctttcttctaagttaattacatgattcttttttcagttttgcttcaatgtttctgtttgccaaattttaattggcaagttatggtgttcttcaatgattatgccttggtgtgatttgcttggatgtgtgtttagagagtggagggtagaagggatgagatttttgtgaaatacagtgagcaggggcttagaaaacctactgcagttctctgtgtgactaagcccagcactagtctgaaacttcgtattgtacttctctggaatgcaataactatcgtcaggaagacaaacgttgctgtggcttaaataaaataaactgacatgatgtattaccagtcaaaataaattacccaaacagtcttgtaaagttgtgttttttggtcatcagaactgcctcattattcatgtgtctgtttgtctctttggttagttttgcttgttgacttgcatgtatcaatgatcacaatccttgtcatttgccaattccatataaactttcagaaagtgaaaattgcttttaagaaatttattttgaagtttctacttatatttacccacataatgcccctcactgatagccagctttgtttcttccattcctttgagaatactccctagtgaatttaaagagtaaaatctgatgttgtggattataatattatacaccaataagtggttgttacacacttgtgtccacacttggtaagatgtccttgtggatgtatctcttctatgtatagtatattaatggctttatccgccatttaatgtggttcccatgaggtttaggtagaccatagatactgtttcaattagaacacttcatgaggatttagtttctctgtctatgggtcctgtatctgaactctccatttttattcttttgtttgttttttgttttgttttctccctgatgcctgatatcagaagaactctccatttttggcttcattctctgctctatccacatgagacagaccaatgtctgcaatctagtgccatacctttccaggttttttatgtccaacaaaaaaagagagcatctctttctagtagctcccacataattaagggtatagcccctctcctgaaccaatcagtcaatcacagtggtcccatctgaccatggggatgttccccaaaggaaatcagggtgttatttttcaaaaggaagaagaaataaatgctggaccttcataacaaccaattgcccactaaaagtgcagtcatatttcttgatgaaatagaacctctccttgtatactgggctccatgacacattgatcatggttagctagaagattctgaagtcttattatccactttgccagttacatttatttgtagctcaaggggactgttaagggaaaggggagcagtgctaaaaacaaatcccattccaatattattaaaaaaaccattgctctgcccttcctttattcacaacttagttcctcatcctcatcttccccagctcctccttttcagctatttcctctgtaggtgcccctaccactaactcccacagattcccccatctcctttgaagaaaaaagctagatgctcccactccctttatttcttccacagtaaccagcttaactagcacacggctttgtacatggtacacagttaagtaatatttgtgaaataaatacggaacacttaagggaaataaaaagcaatctatcctcatcaagaatgagctgagaatccctgagatagcctatttagcagcttagcctgaattctgttttagtttctgtttctggaaactcttcttattttaagaaagaatgattcttataattatttcatatttgttgatattatccagtcttagccagttatcaaaatggtcttgagaattaggaggggaaagcataatgttataaacatttcagcatattgtgcaagtaaagtcctggtagtctgggtaattctagaactcgagtagacttgaagtgatatcagaggaaagctattacccaagtttactgcttgctaatcaggcagccagcaataatgagatggtacaatagaaatgttcaaagtaaggtttcttggcatacatagctatttaattattttatttctgaaagaactatagctccactgttacctaagtttaacctttaggcatttaatataatagtatctctagtgtaacagagggaatcaattactatgataaaccatatcctttgtaaaagaatactataataccaagaaaggcttttgtcttcatctttttagtttttggttattttttgttccattccctttaggtaagaataagcatctagaatgcctcattatgagattgttaatgaatattttccattgtaatttaataagcctaaaaataagaagatactcctctactttgtcatacaagatcgttgaatggtgggtcattagttgatagcaaaaagtcactcattcttagttatgtttctgatgacttgaaaaattgagtggcagtatacaaagtctgagcaaaactgacttcagaatgagtatttggctttgatttctcatggcatcttgcccattgagccatcttttcagaggtctcagctgtatgaaaaaatagtacttttttttttccagaaacatgaagtctggcaatctttataactttgtgcagcttgttgattcccggattcaatggtgttagtgaaaaagaagtctcaggagctccagagtctcagaagaatgacaagaagacccctaattcttgcctgtctctatatttagtatccaagttggggataaaagctagtttttaagattttctgttcagaaatcttttctatatactattcagaggcagccctttgtttaaacctttttttgtctcaggcatggattaactgcaattggattctatgttaaaaatgtatttttttgaacattttgtaggcatcactccagtattttctattggtgaaatcctgatctttttctgtgtagaaatttttgtgaccttcttttctttactgaagttcccacatttcatgatcaattgtcttggtctgcatttttatccattgccctgggcacgcaatagaccttttcactccagagatatgagtccttcagttctgaaatgtttgctcttattcattgataattttatgccctctattttctctgttctttcttccttgaattctcattatcttagttggatctcctagatcatatcctttaatttcttaattgttttcttccttttttgtctttttgttttttggtcttctagaagatttgttcacacacatttttattttccaaccttactattaaaatgtttattttggtcatgatttaaaaataatttagcactctcattctctcctttttttttttttttttttttttttttttgagacggagtcttgctctgtcaccaggctggagtgcagtggcataatcttggctcactgcaacctctgcctcccaggttcaagcaattctcctgcctcagcctcccgagtaactgggactacaggagcatgccaccacacccagctaatttttgtatttttagtagagatggggtttcaccatgttggccagggtgatctcgatctcttgacctcatgatccgcccacctcagcctcccaaagtgctgggattacaggcatgagccaacatgcccagcctcatcctctcctttttaatggtatatgttcttatgtcagaagtgtgttttatctaaggtcacagattattatcctcttgaggttttcctctgtctctctctttcctgtagatttctttcttcagttgatgtttgcttcttctagtttctcttcttcattatggagagtttccttaagaggctgttcattcttagttaaaagcaagacatatacaggtgcatatgcacacacacacaaaacaaagcaacaatgacaatgatggcaagaaacaatgtcagaagttctgtgatcatggatagggctcgtcaactgtagggttgcactgttgcatcataggttgttcaatcaaagccggtgtgttctttgaaatgtttccccaaggtcatgattagggggtaccccactttctgcctgcgagatttgcgcctggggcatataactgactgctaatgtctggggagcatgacaaataaaaaagttgggtttcttattgcaaactctataggctttcaaataagcacctatttcgcaacctgcagcctctcctagtttgctacagtgcctagtatcatcagtttcaaatctctctagccgatttcctccaaaaaagaaagactccgcttccagtaggtaagggaagtagttagtttggatccaaaggctccatataattttaatacactttcagcccctcgctaaactcctgccttccttaattctgctgcctccaagcagtaagtctttctggattcgggagaacacattagtccactttctcttggaatttactctccgtaaccatttcctcgattatgctaaggcacttcagctattttctgatttcaaaaaatcagtagaaatctctcctttgctgatcttgtttcctttattatttgtgcctttgtgggtgggtgtgttgtgtttttattcctttactttcacttcagtgaagtatcagtaaaagagaaagaagataagcaggcatgatttcaccctctcttactggaaatccaggggaacgatagctgaggaggaaagtagcttggaagagcaccttagagtagaaaaagacgggagaaggtgagtttacaaaagtacagcaagatgatgatgatgataaataaaactcaatgcgtgctcactatgtatttgcactgtgcaaagttctttacatggattatttatttgtgtttttgtaagaacacctcaggaagtagctattgagacacagagaagtaatatgacttgtttaggttagtaaatggtagaggtggtattcaaattcagatctgatttcagagaccatcctctcaactgccacactatcttgcctcctacaaattgcttaagcagggatttaaaatgaaaccgtacttttacaaaaatcatttttcatgtccattatttaggagtctctctactctatcaaaagtattaattgacctatttattaatatcttagtaatgtaaaatgcttttaggtttgcaaattagtaagagaaacttcttcagattaatagatgctgtctttatgaggactgcatgagacttatgtactcatcattatatacacccacagacgatctatttgaattctgtactcttactcttttgttaaataaatgtactctttctaactatgttttaaatcatctgcaaagagatggaagctgtgtgtatacaacagcaaacatctggaagaaaagaatattcagccaaagcttgttaaagagattcataagcaaagtatgcctttgaattatgaaaatgaattcatgtccaacatcataaagaactctgacatgtctgtttatgtttcaaacatggcttagagatcactgagattaaaattcaattaagtgtgctctgttgtctttgctgtcaatttcagttaaaccagacttgtttggcagttttggggagaaaaatcttcagtgttttaccttgctaacattttaccatttggactttgtgttttttcccartcaaatgcatgtcatttaaggagatgcttcatgttatacacacctggtgattttcatcagcagttgtacagatgaaagagaagtaaaagcccccaaataattcatcttttaggctttgtaaaattatcattttataaatttttaaattgtgaaatataacaaaatttaagaaagtatgtaaaatttaaattttaagtttaacaaattgttctaaagtaaatacctactatgatcacccctcagaaagaccctataatttcctgtttcatcctctccagataggtcaccactatcttgactttacttttacttttcctacttttctttatgatttaccacgtatgtatgcatgccaaaacaacagttcaatttagtttgttttgcattttatgtaaatggactcatcttgtagatactcctgtgttttgctccttttgtgcaatattatagttgtaaaattcatcaatgttgtatgtagctgaggattgcacatcataatatatatcatgatatatagcattctrttgtataaaggaaccacaatttactgtccaatcttctttctttatgcagttgaacatatccagtttggaaatattatgaataaagatatttcgaacacttatgtgcgtgtatcttgatgcacataagcgtacatttttgtgggggaatatacctaggagtggattcatgggtcatgcatatctttaacttcagcagataagcagaaagcatttgacaaagtggttgagaaggtaatgagaattcctgttgctccacgttctaataaaaaacacttggattttctttcttttttttcaaatgacagggctctataatgggatcattgcatttctctgattactaatgagagtgagtactccttcatatgtttagtagatatttgaattgtatttgtttttgttgttgttgtagctcttcatgaaaagtactttctaaacagcatttctgagcaccctttagggagccaaaggccaaataagttagagtatttgtcacaacatggcaataagagaggcgaattcatccattaattgcttgccatatgcttatcactggaatatattttgcagcatctcctgacatcactatttatcccttttaccaaaaaaaaaaaaaaaaaaaagaaaaagaaaaaaaaaacatggctactgataatacttgggagcactcaacgaaggtcccgtctgagactctgtagaatatattatagaatgcaaatattctttggattccgtcttgttgttgttgttgctgtttcctaccctacaacttttggcatctctacccaacatttttataatacaggactgtctctgaggtttgttttccttatggttgttctcatgtataaaagagatgatgatagcgtttctcatgccagtatgtctgtgtatgatttatgttgtaaacagtgcaaagagctttacagccattgtctcactaatcttcagagcatcttttcgaaatagagaggagacaagtgaatcaacatcctctatatcacgggaggaaacatatctccctgtggagagatgtccactgctttatcgacaaggcacaaagctgcgaacagaattcaggttgtattctgactcctacactaatgcctatggactagacatggtgtaaaattttatatgcgtgaaacatgaggtgtattcatcaactgatcactattagcmactggctagaacatgaagtgtttgtttgtttttcaaaagaaagatatgatgaaactttatatgcttttacacagttctgatattttaacaatttgactaatttttatagttttattccttccagaaattcctttaactgtgcttatcccgtaagtaattgctaatgttcttaaactaatcgagaaaatcatttctattagtccctaaatacccagacttcataccttcttgcttcccactctcctcatatctaatctctcccttaggtttagcaacaaaatgtgcagcttgacrtggtcagtgggtgtctgaacatttagtgctagtgtttcctctcatctctctgcttttatttggacttctcaactcttaaaagtaattttaacatattataagaaatctttgaatttataacactttacagtttatgaaagactatataaaggttccttctcacaggctgtaaggggtacaaggacaatgaaactcagatgacatccttaaatgcactctactattatatggctaatttaagattaaaaatctggtttcataattattagtctagtggtccttttataggcagcataatacagttgtaaggagtacagactgcctgtttttgaatcactggtccatgctaactagctggcttacccttgggcaagttacttgaggttctctgtgcctcagtttccccagctatcaaatagatctaagagttgtgaaaattcaatgagttgatacatataaaaatacttaaagcagtgcctgtccaacataaatgcttaataaatgttagccctattatctttcctcattatttagtgttaaagagcaagaacatctataaaaataaaaatcaaataatccttcaaaaattcctgaatattataaaactaacatataatgtcaactaaaattgataccaattagtttccttatcttgaatgaaatcagtattgtagtcagagccaagctactgacctggattcacatataacattcagtttctcttctgaaactccagctcacttagcacatttatgccaaaaacaacaacaacaacaacaacaaaaatgtataaattgcctcatttgtttgaagtgtaacactcaggttttccatacagcaggaaactctgatagaagtatagattaataggcaaggcattgctccattccctaaaggcgtaataaggctattccacaaatatgtattgaacttctacacaggtttaagaattatgaggaggagagaagatattgtaatgaatccctactattctgtttattttttatttctttttaactttttaagttcaggggtacatgtacagatttgttacataggtaaacttgtgtcatggggtttgtagtacagattatttcatcacccacatattacacctaatacccattagttgattttcctgatcctctcactcctcccaccctccacctctctgataggtcacagtgtctgttgtttccctctatgtgtccatgagttgtcatcatttagctcccacttacaagtgagaacatgcagttcctgtgttagtttgctaaggatattggcctccagctccatcagtgttcctggaaaggacactatctcattcttttttatggcttcatagtattccatggtgtttatgtaccacatttgctttatcctgtctactactgttgggcatttaggttgattctatgtctttgctattgttaatgctgctgtaatgaacatacacatgcatgtgtctttataatagaatgatttatattcctttgggcatatacccagaaatgagattgctgggttgaatgctagttctgtttttaggtctttgaggaattgccacactgtcttccacaatggttgaactaatttacactcccatcaacagtgtataagtgttcctctgagtacctgttattcctttgaagaaaatacctacacaactagataattagagaaggagagaaagagaaagagagagaaggatggcacaataataaagtgttttttggaggcaaggatgatgttttatgaatttttgtattcccagaaaataacagataagtggttattagtgaatgaagaaatgaatgagttaactaattgtagcagaaaagggaaagataaatataaataaaggtcatccatctatttaacaaacatgtattgcatgcctaggaattgtacttggcttgaagactttaaagtagattaagacagtcccagacttcaaggaccagcaactgagggtgttaaacagaaaggacaatgacattacaacaagctgtgggttcacacataccatttcaagactagagaagagaagaaaatcagagattcttccagaaatgaaaattcttgagctggggctttgaggatgaggagaagttagttagttagaaaggaaagatgagtaaggttgggggtcaatagttcgagcaaatattgcagtatgaaaggtgtgagagagcctcaaacaggttacagattgtggcactataggtgatggggaaggagtgagagaggtaactacagagaagtaacctattaggaactgctaagaaatgttagatattatgctaaaaagcttggaatattttttaaagcatgggggcatcacttgatgatctttctcaaggacaggactattaatcttagggtttattatattcttcaattttgacacaatttatacttcaataattctctgtaagaatttttttcctttgtggtcttatttatttattgagatagggtcttgctctgtcacccaggctggagagcagtggcaatcatggctcattgcagccttgacctcccaggctcaaacgatcctcctgcctcagcctcccaagtagctgggactataagcacgcaccactgtgcctggctaatttttaaaaatttttgtagagacaaggtctccctatgttttcttggctggtctcgaactcctggtctcaagcaatcatcccacctcrgcctcccaaagtgctgggatgacaggtgggagtcaccacatctggccttatttttttaacgtattttttaaaaacccaagaacaggcattttctgcgtaatgtgcctgcattttggctttgtatttactaatgcttgaattattgccttagctatacataatcaactgaagaaaagtatttaacttttagctacagtgatttctcatatggaaactgtatacttctcagggattgtggaaatgtccttggaagtctatgacccctcaaatttgagaaatgttgatgtggaggtagaattggagtaggcaggggaaagacaggtaccaggaaaaccagttcagagcctactacaataatcatatgagaaacaaagagggcttgaactaagggagttcagatgaaagaagaatctaatagttatttatagagtaaaatagacagaacttggtgacttccaggattttaggcttgagagagggaggactcaagaattgtacatgggtttctggtttcagtgattagatttctggcatctgctgtccataagatagtaaaaactgcagatagggtaaatgccagtattggaaatatgaagtttgaggtgtctgtgcacatccagatagaaatttatggaatgtggaagagcaatgtaagctggggttttcagcacaatggtaggtaggtattgtagttttgggggtgaaggtactcacacaggcaatgagtagactaaaaaaasaaaaatatagagaaagaagaatccaacaaagagattgagaagtagtggctgagaagtaggcagaaatttaggagagtggtgttctcaactccaaggtaggagagaattccaagattggaattgttagaaaaatttgatggagaaggtattctttgaactgtgtgtgaatagacaaagagctctgacagagcagaaaggaggaggtatggattctgggtgaggaaatgttataagcagtcccacaaagagtgacatcagatttatacaagaagccagagcttgactgtagtgggcagtacagcatagggtggaaagcatagactctgaaaccaactccttaggttcaaatctcagctctccacttttagctatgtgacccttggcaggttatgtaaccttctaaagcctcgattttctcctgtgtaaagtggaggcagtgatagtacattgttaatagattgtttactttttactcttctgtatagacggaccccttgcaaaagtcagggtgattttatatatacaacatcgttatcagctacctctgaatacttgattcttttccttctacaaccccaacctccatttgaaaagttctcattattctttttcttacctattctaaaagtatcactcagtccccacttcctccagggagcttttctgacgagtattcagctcttacttcttagacctccagtaacatctaatgtttgtcaagtacaattaagcacttgcttttacaaaactaattgtgggagattatttctaatggtttcatgttttttaatcttctatccccaagaaagattgtaaacttcttaaagtcaagatacatctccagggtatccgcacattttgccgtgcctgggacactcagtttatgcccattgtcctgatatagtttatatgaattcataatttatagtgtccacttttgactctctcaagagggtagttgtttgcatgataaattccatgaacaacctggatataataatacatactttttgaaattagtaacaaatatttattgagtggctatagcatatctattacaaaataataataagcaagggggagaaaacgaactgtcaataattatgccattgagagataatttttctgtctctgtgtgtgagagtgtgtatgtagagagagaaggagttttactaacaacaatgagattatactgaaggtaatattttataatctgcttttaaaatttcacagtatattgcatcatgaacacttttcttaccattaaatacaattctctatataacattttaatggcatttccttacatgaatatactacacttaagcaattttctattattaaatatttgaagctctccccagatttcacattataagcactattgtgatgaatatctttgtgtagagtctttatagcaaggctgggttgttttcttactatatatttctagaattagaattgtcaaactaaagaattgcccaatattttaaagatttatttttgctattattgtcatattgccctgcagaaagtttatatatacttcatcagcagtctctatttctacattatttccgttgctatattttatcattttaattgttctctttatttgatgaatcacatagtattttgttttaataagaattaatttagcttcaagaatattaaaatctgttttgtgtgtctaatggcaattatacatatttgctttttattattttattatttattcgtgggctgatttgttttttcttgttgattttatttttatttattttttaggagacaggtgtctcactttgttgcccaggctggtctcaaactcctggactcaagtgatctgactgcctctgcctctcgaagtgctgggattacaggtgtgagccaccacccctggcctcttattgattttagagtgttctttagagattaagaatattaacttttcatttatgtttgttttttacacttttttgccatttattcatttctatttttacttttacagatactctattttaataaatagaagtttaaatagtccctatgtagcctgtatgtttatattgtttatatagtctctatataaatatattttataaatccttagcaattcttttccaacaccaatattttcttctagtatttaatcattttacatcatatatttatatctctaataattatggaatttattttactttatttcagggctctgatgttcttttcctagattttctaaattgtcagaatcctaggtattacataatctattatttccttattggcttgaaatgccacttctactgtttatggttagttccttttttaatctttacatcctatttctagacaaaaagccccatgttataattattatggattttaagaaatacattttaatatctgggagaacatattccctcttaatcttattttttagaatttcctgggttattctcacatcgttgtgctaaattatacaaacaatctacttgtcaagtcccccccaaaaaaacccattaagattttgattgaaattgcattaagttgcttataagcagtttataagtactacagagctccttatgatatccctgccaactacttaagaaactcctagttcttaaattacaaatattcccagtcaagaaaggatcaccagacatttgaaaaaagacaaaaaaccaaaccaaacaaaaaaaccagtagcctaaacaaaaaggaactaataaataaacaggacaaatttattttcctgagacaatttatcttctgctttccagaagaaacagagacaatgaaaagtgtgggaaaaatttgtcaatattaaattttcagagatattcagggggagaatataaccattaagtatgatctgatttccataaatagcagaatactgaatatatatgtatatataaagattggataaaatgcaattcaagtaatattcattcttgaatattgaattaagcaaatatcttagaatatagagcaaaaagccaaggatataaaatatgatggaaaagtaaaaaagatatgaagaatgtggtagaagtggaggaatgggaaaggatgtgggaaaataacagaaaaaaaatccttgacctgaagagtaattcaagtcctcagattgaaaagtttcatccaacaccgaacaaggaaaaaaggatacatatctagatgtgtatacacatgctgatgaaaattttggaattctaagtataagaaattaatccttccagagaacaaaaaaaaaggatctttcaaaggtatcaaacttctcatcagcaagattagaagtgaatgcagactaggcaaggtttcaaagttctcaggaagaagaactagaacccaaaattgatagtcaaactatcaagtgttaagacaaactaaagatgtatttaaacatggaaggactcaagtttacaactttacctcctacagattcttcctaattaaaaggaagtattactcgaagatatattcaagcaaaacaaagcaacgggaatcctatacagaaaacctaggatacaaagagcattggaaccaacccagatgtttatgaaaataaatcccagtatgacaactgtgtagtagtaggcctagaaagcaggcagcctaagttagagtcatcagaaggttccaggaaaaatgctttcaagaagaaagtagacatcacatttcgaattgcataattaagagccttttaacattttagggcaaaagtaactgcatttaactcatagattaatctaagacttgatatctttataatattgactcttcccatgtaggaaactagatatattcttcaagtttttaaaaatgtccttcagtgatgttttgcaataatatttatacaagagttttacatttttcgttgtttatttatacatatttgatatgttttattactattatgaataggatcatttatctattttctaactggtatatagaaaaaaacctgttgtggatacatgctttataatgtttgacctttcttataaatcataatggtctaccttttttatacctttcagttgattctcctgaattttgagttacagaatttttatcttaaaatagaatgatttccttctctcttaaaaatatttgtacagcatatttggttttcttgtttggttgcttacgttagaattttctgagcaacattcagtaatagtggagacagcttctttttgtttctgatttcattgttaattatagatgtcgaagaaaagctattcattaccatgaaaaggaactattctattcttattgtactgagagtgctattttactatcaactctttaataagtgtgatatactactgtattaggccattctcatgctgctgtgaagaaataccctagactgggtaatttataaagaaaagaggtttaattgactcacagttctgcatggctggggagacctcaggaaacttataatcatggcagaatgcacctctttacagggcagcaggagagagtaagcaccagcagggaaaattccagaagcttatataaccatcagatcttgtgaaactcattcattatcatgagaacagcatgggggaaactgccctatgattcaattatcttcacccagtccctcccgcaacacatggggattatggggattacaattcaagatgagattttggttagggcatggccaaaccatataatctacattaaggacattgttaagtggcaggataaatggtgtgggctcaactttatactatagaggaccattatagcaatatcataaaagtaatactttgagagactaagccaataataggacaaatataaatttgaggaaaagatatacaaaaccatttagtaattcaagcatctagtgataattgtataaccatatggacaaaggtagagaaaaatacctatagaaagtttgaacttaagagataggtcaggtaacaaacccactttttttcttttttttttttacctgattacttcctggtcatgaggttcaaaatatttgatagcaaaatgatttaaagtccaaattaatattgaattgaatatacacattacagccaaaaccagacctatttttctgttgcttatcatatataattatagaaagcataactgaacaacaggaagttattacttcttaaatatcagaaaacatttgactttctcttctgaaataaggaacggcagtaaccgaattctagttactgctcttaatagttttgtagttctcataaaatattgcttatatattatttggctcccacactatccattttgatggttttaaatttttcaaataaaaataaatgagttttcatactatggatgacttgacatcagttaaaagtgtaaattcatacttgaagatagcaggactctatgctctttcctcattgttctggtcaaatacatttccaatcatgataatcaataatgtgactattaatttttacttgaagttaatctattcatgtttgattagaagtgtctaaaacataaacttgggatgtcaatgaagaactttttaaaattctcctccacaatggctgataatcaggccatgattatattttgaagattttacctagttagtcatatttggggtaagaatatatgctatctccttcatattaatagttcagatctttaattataacatgtttcatggtctataagattaaattgaacattaggaaagcttagcatttctcatttgtgagtcttacattcacacctgtcaggattggtacagattcaagcttgtttttaataaacttcaaagaagatcaaaactagggatcatctgtttcatgtctttgacgtgatagaagtttggggcccccgttttgccctgtagcttttgcctaaggagaaagccacccttttcagctgatacttgctcccacaggtttttcacagtttttgagtagcgagtggcaagaagcaatatgacgatgttggtaggtagagagatacttcttcaccatctggtgagcattctggagaacagagacaagtcccacactgttaaaggagtgaagtcattttgcagccagttttaaggattgatttaagaactctaggagcaggccattatgtagtcatccattcagcacgattcttcgtgggactgtttacactagaaggaactgtagtgatcaatttagcgttgaggaaactgagggctacagagtgccagggtcacgttcatcacacttatttgtgtttcaaagcagaatccacactccaaaatgtgcaactactgtcttactatggaatttacactgacacattctgaggtcatgcaggaaatagaccagagtaaagcattagcaattaggtcagtagcttgagataatgcaggctctgaggcaatcttcactttcactgaccacagactgggattgggaacatgggaaacgtgtgtgtgtacagacacagcaacccttttctatgtgtcatgtcttcagctgagttttaagttgtactagtggaagccatagcctatgttggctcataggtcctagtgccctttccccttcccttgcctctgcccctgcccctttccttgccttgcccctgcccctgcccattccccttctcctctcctctcctctcctctcctctcctctcccctcctctcccctcctttcctttcctttccttgacactgggtagagtgtaatgcaatcatagcttactgcagccttgaacttccagggctcaaccagtcctcctgcctcagcctctgggtagcaaggacaataggcacacaccattatgcccagcttattattattattattattattattaattttgtagagatgggtcctgctatgttgcccaggctggtctcaaactcctggcctcaagcaattctctggcctcagtcatgcaaagtgtagggattacaggcatgagccatctcttccagctctagtgctatctctttataggaatcaaaaatttgttttggctatttcaaattttgtagagtaagaggtcaattagaaaagactcagttatgttttcaaaaatgcactgtgtgcatatgtgtgtagaaatgtattagaatgaaataacatttttttacagtggctaccattggtttgtgaaattatgcatgctttttcttaattttctctaatttttctctatttcctaagatttctaccatgagatttttctcttaatgtctagttttattacataggtaatagataaatatattcatgtcataaaatatttttaaaattcagaatatgagaaagtcctttttcatgctccttagtcttgctgtctttcttgaaagtatccacttagtgatggatacaatatggtgtatatctgccttaatccattttgtgctgctctaacagaatacttgagactaggtaatttatcatgagctgaaatttattggctcacagttctggaggctgggaaatctaaaatcaaggtgctggcatctgttaagggtccttttgttgcatcaccacatggcagaaagcaaaagggagagagatagacagattgggagagagagaggaaaggggaccaaacgtctcactcttttataacaaacctgctccagtgataacaggattaacccttacatcagggcaaagctcacatgacctaacacctcttagaagtcccaactcttgctggatgtggtggctcacacctgtaatctcagcactttgggaggctgaggtgggtggatcacttgaggtaaggagttcgagaccaacctgcctgagcaacatgaagaaaccctatcaatacaaaaaaatacaacaaaatagctgggcatggtggcatgtgcctgtagttccagctactctggaagctgaggtgggagaatcacctgagcttgggaagctgaggccacagtgagctatgatcatgccactgcactctaacctgggtgttgaagtgagaccctgtcaccaaaaaaaaaaaaaaaagagtcctacctcttaatactgttacaatggcaattaaacttcagcctgagttttggatggaacaaacattcaaaccatagcagtatcttttcagaatttttaactgaatatttatatatatgaacatttagaattaggggtaatttttaaaaatcaaaagtgatatactacagatgttattytgtgattgatctttgcacttactatgttttggagattattttattttagtacgtataaatctataccagttttcttaaattgcagcatagtatgtatatcaagtttatcctttaactattttcttactgatggccttttttaatattgcaaaccatactacactaaacattgtcgtgcatacttccttgtgtattacattggtttttaaatcaatgaactagttgtaaacatggagagaaacaacaaggagggagatggatataagagaagaagagattaaaggggatggaatcagttgtttctggagcacagaatattcaccaaatttgaccagatgcgcggttgctcatttaggaaagagcaactgcactgggatgaagaggttttttaggaaatcagaggtcttcagagaagttttggttaaaatctgcagtatacactaccaaaatggtttttgtctttgttgttcttatgcaagaaagactagctctttttatctagagctggaaggttgctgtcttggagtgggggagaaaggagacaagtatctgatgggtgggaatggaaggtgtgtatccttgcagcagacctccagagtagctgactgactgatatgcatggtagtcctaagatgtgtttgagaaaagaaaatattaggagctcttgacaaatcttgaaaatcaatacaaaaattagccaggcgtggtggcgtgtgcctgcagtcccagctactcagggggctgatgcagagaatccctagaacctgagaggcagaggttgcagcgagatcgcaccactgcactccagtctgggcaacagagtgagactctgtctcaaaaaaaaaaaaaaaagaagaaaaaaaaaatcagttgcccatcctgcagatatacagtatagtgtaactgcttcagccgcttgcaaatctcttttacaattcaaaacaaattatggagaaataagagtgaaatattttcctggaaaaataatgtgaaaaattgaagttttaaatatcatagttaaattgaatgtaccttagggacaactcctttatttaaaactccaattctccaataacacacctaatatttgttattttgttgttaaatatttactctatgtagacattatgctaagagtataatgcctttttaatattcagaagagcactctaaaagctattacagctttacagacaagaaacttgagaccagagagaggttaagtaacttgaccaattgtcatatagcatttaagtggcagagttaggatttgaacccaagtttttatgtatttaaaattctggctattaacaccacactgcaaagaaacttatttagtagataacaagttatatccatatatttttagatatcaatatatatgttgtggatcggtagcttggggcacattactgctttgaattgtggtatcttttattagatattgaaatactggattattgataagaccatgtagcagtgagaaaaatagtttttgctttgatttgtgtcagttatactatgttgttggagcttttgaagtagggagtgatcaggtagagacaggcagaagagattagtttgtatgtgttatcctgaaatctgagttatttgacatttttaaggcaaggcattgattgagttttatgaagataaattggcaaagaaaagtaatcccatctgctcaataacaattctttgcttttagccaagaaaattgatttcaacttgagagtaataatcatatttatcacacttgttaattgcatgaactgtatacaaattgtcaggcttattaaggtagatatttacggtcactgggcgttcctcacattccacattttcattgttatggcattaactattttttctgtttctctctttgtcactgaagacttcacgtagtataatagccagtattttctgtgattatatagcaatattctcaaacctaattgttcatacaaagtacaaatcagggactttttctactaggttctgaagtacttgttctctagatttaaactccagtgttgtactaatgggagtaagtttttcttttatctgccaaggagctcctcttacatgtaaaaaactgttgtttttcctctttgtaaatatcagtgtaaagtacacactgtataaaatgtaaattactgatgtgagagtggccattttattcacattgttcaatgccaaagtgggccaaaggattctggctcattaactttaaggaaactatagtattcttttgtctctttagccttccttctggtttattcaaagaattctcatcaggttgatcaagagttgaaaagtaaagcactgttcttaaaaactgctctctagaaagatctgcaatggttttgaggactgccaagcaacaggaggtagaaaaatggataactaaataacctcatttacagaaaatatgttaggttaaattgcataggaaaagatagtatgggtctttaaaaaaaatggatatttataacaaagaaaggataaaattaataagtaagttataaggaatatttagaaaaataaaaacagtattctaaaagacaatacttatatctttctaatgtaaatcttagaaaatggtgagaatttcttgtatgctttatatttataagaagtaataatagcttttgaaataattccatattataagaagtcttttcttcatatgtacccaattccaaataagtggatgctggaagaaaatctgtaatttattttatttaaaagaaatgcagtatattaataaatacctattttttggataataaaataagcaacattttccagaatgaggtttttttttgcaacaaatgtgcataccaatgatttgaagtatttaaaagaaacttttctacttgaaaggaaccaagatgactaagtactaattttgcggaatctccaattgggaggatatctactgctcagaaaagcaaactaaaacaagacaagaaattaaaattgacaaaggagaagttccatataatctaattcaaaatcaaatgagtttttcaaagaaataagtttcatcatgtaatctaagccaaaatgagctgaaaatttacacacaatttcttttctttttctttttctctatttcccattaggtggtttccatccatggaaactagttacatggcattcctaccatcccatgcccatggtagacataattaagaaattgtgtgtgtgtgtgtgtgtgtgtgtgtgtgtgtgtgtgtgtgtgtgtgttttgtaagctttttactccttctcaacaaagcatttcaaggagccaacagcaaattagaattgaaactccattatgtctctcaggtcttctgatcagctcttattatacttactcttagtaaaataatctctattaatagtgagaagtaaggaactatatgatataataaaaagtgctctaaaggaagtcagaacattgtgtggaagtcctggttccaccattaatggtaaactctttgaggacttccaatttctccaggactggttttcaatctgtataattaaggggtttaggctagactctctttttattttttgaaacagtgtctcactctgtcacccaggctggaatgaagtggtacgatcttggctcactacaacctctgcctccctaggttgaagcaatccttccacctcagccacctaagtagctgggattacaggcatgcaccaccacgcctagttatgttttcgtattttagtagagatgaggtttcaccatgttggccaggctggtctggaactcctggcctcaagcaatctgcctgcctcggcctcccaaagtgctaggattacaggtgtgagccaccacacctggcctagacgctttctaaaattcttttcagtttcaaccttctatggcttttggattcttttatttcttatactttcatattactgaatctcataactcactttttcctccattttatattttcaacttttctagtctagggctctgcacaagttattactctgcccttttattactactccaaggtaattcatgttatatgtagatgtatattagccatgacaataaatctacatactgtattatcatctttccagaatttttcaaaacagaaagtctttcttgactaatcatttattccccatataatagtatgaagttattaacaaacgttccttgaattatgtgtgacagaatttgctgggagcttgaatcagtatatttgtttaggctgcatataacagaaggcttcatttaaaatagcttaaataataagagatttattgaattatataataagaaggtagtgatagaatgattctagtagtacaaacatgcatcaagaatccagattctttccttctttctagtcacccatcctcagcacagtagtttttgatctcagttttatcctcttatggtctcaagatgactacagcagctctaagtatatttatacaacttccttttcttctgtcactttttaagaaagataaaaactttaccagaagttccttaacagatttctttctcagatctgtattagaaacaaattcatcatatgcttatatctaagccattcattggcaagagaaatgctatgaaattggctgggaagtaatcatggttcatcctggtcctgggaggggcctgatctcccttgaagcaccaaccgcctgacacctgaacaaattctagtggctgctgggtagggaacaacagtgtctttacaagttggtgcattataaatacatttccataatttgaatcaagcctaccatctcctcctcatctccaaccacccgccccccccrccccccactttattttctgtatcttcagcaacttccagaaacttctcattcttccttaaatacacatttttgtacctgccatattttgcatgccctcttttatcagcctggaatgcactttgtcacctttgcagcctggtaaaaccatcattgtgctcatatttcaagaaccacctcaaatgtctgctctttagatctgaacccttcctgaattccccagcttagcaggtcaagtgagttgttctcagctttgtacttctgctatagatcagccctcatcattttataactatgtattgacccatttactcctgagaatcctgtaaggatgggactcagttccttggtattttgttctcagagagatgatgcttcatacttaccaactgttcaataaagtttgttgaattaatatagttaaaagcagatacctttctgttataagttcaaagcctagtgattgaagatttttctttacattatttaaatgtatttattttggtaaaatatttagagcaagtttcattccatctgttccatctaagcgattcatgacctgcatacattctaaatgacaggaaccacaagcaactcagtcagcaggcttcagaatcggtcatcctaaaagatattgcaggtcaatggctaatacactaacaaagaaagagcttatgcaaataagtaaggaaaatactgtttcaatgttaaatcattaaagacaaattcagactactcacaaagaagatctataaatgccaagttagaatagtaaaacagaaaacaaaaaaacaacatgaagacctctgattacatctatagtaattaacatatccatttaactcctctgccttcagaaaaccatcaatggatgtttataggyataaatgacaaggacaaagaaagtgggaagggagataacagcaacaaaattttggaagctgaaaaacmagtatacaaggggtatacttcctgatgaatgtaaaaccgtccctagacaaggggggcctargcaggttgaagactgagtgccattctgaaaacagagggattaaataaacacttatatatttgtgttcatgataacacaaggctttttaaattctgtttaccactgtgtctccggtggctagaatagaggctgccaaatatagatgctcaaatatttgttgaatgaattccgaagrttgaaagtcccaaccttcttcccctagtcagcttccaactatgcttaagccttctggacaggagattgatataacctttggagaattcaccaacccaagagaaaaaacccaaagataatggtgcaaggtatttctgaatgaaactgttcagttggatcatcaaaaagtggatgtagttgacaaatcttacctatgcaaacagagcttccaatctgatttttagtactctagccttaaatatgagtagacagataagatttatcaaatacttagaaaaagtaagtgaaagaaaccaaaacaaatggaaaaagaccaacttcaaagtacagatgttggccgggcgcggtggctcacgcctgtaatcccaacacttcgggaggccaaggcggggggattaccttaggtcaggagttcgagaccagcctggccaatatggtgaaaccccgtctctactaaaaatataaaaaaattagctgggcgtggtagtaggcaactgtaatcccagctactcaggaggctgaggcaggagaattgcttgaacccaggagatggaggttgcagtgagccaacatggtcccactgcactccagcctgggtgacagagtgagactccatctcaaaaaaaaaaaaaaaaaaaaaagaagagaaataaaaaagtacagatgttgcaggaagaaggtatcatcagagagaggagaagaaatacacttgatattgtattcataaatattaacattgcttccacgaaacaaaagcagatgctatggaaaaaaaaaaaaaacaactcagagaataggaaaagagctcttggaaagtaaaaacatgatagaataagttaaaaactcaatagaagggttgaaaggtaaattgaggacatctctatggaaatggagcaaaaatacaaaaaggtagaaaatacagaagaaaaagtgggaaatcagaggaccagttcaggaaatctaacatctaaaatcagaaattctagaaaaaagagaaaactgcaggaggacaaaattgaagaaaaatttccagaactcattaattggagcatttagcacaatataaagtattaaaaaagagacttgtgacttgttctaaggatcattatcgtatcgtatagaaggatcaaaaatcaaaagggcatcagacttctgaagattcgttttgaaacctagaaaagaatgaagtgatgccttttaaattccgaaggaaagtgattctcaaccaagaattctatactcaaccaaactattgatcaagagtgagcatggaataaagattatttctgaggtgcgagcctttaaaaaatgtatctctgatgcatactgactcaggaagctactggaaaacgtgctcaccaaaacaagggaataaactctaaaaacattacccttgggataataaggaaagaacatcccaaagtgacagctgagcaagagacatggagaataaccaatccaggtcaaagaggcctctggatgagatttcttcaagaagatgaatttaataaaattcttgatgtgtttgagccatacttagatttttgtaatatgggaaaagtttgggattgaattagtgataagtatatatggacatctaagggaacaaagaaactaacaaaagacaagaattttcaagaaggaaaacaaagaaaaaaaggtaatcagggtatgttacatagtttagctgcttatagtttttctttggttctgctcatggaaacacaatgactatcaatctaagtaagactataatatattagaaggatgggtgatgagaagtgtgaagtgttgcaaaggtaaatccttatcttccgctatgaagtatcaataagcaatgcccaaaaaaatgaactattaagaagtaactgtaaagttatatcatttagagatagagtggagtatagcaaatgaatcagctaaaatatttgaaaatgggtaccctctggggagtggaagatacatgtatgtattgtgggtgggggatgcactgcaggagatctctttttttaatccttgtggtactacttagttctctaaactatttgcatctataactttgctaaaaataacatttaaatttaaaaattgatcactcttgtaataagttcaaattgaaacaaggagataacatagttgctaagttttatttttggacatatttataacattgtatatgtgttagtgagaataccatgtaacatcactctcaagcagtacttctaaaagtagaaattgctgtaatatttctcaaaaactatctggcaatacacattaagaggtataaaaatgtttattccttctgacttagtacttctgcttcagaaatctcttacagtgatctaccttctagaaagactggagataaatacatcaaaatgttcacagtagttgtctctgagtggtagaattatgggtaaaaaaaagatggcttgtttccatttttcttttgcacccctctgcattttttccaaataatctataatgaagacaggctccttttatatttggaaataatttccaaatataaacattttaattttataacattttaaatttttcaaaacactggtcctcataacaagaaaagttatttgttgcaaccacagtagaccaggttaatggtgccaagagtggaatgcggataaaggctgacaaggccatctggaactgtgagtcattcagagcatcacagaagagagattttctgcaagtactagctgtgttgactgtgactgctgttttcctggttgctcaggaatcacccagggaaggagagggcttccccacgggattagggaaaaaaaaaaaaaagcttcttgttccataagagagtctacagataggatgagtaataagggatagattttactaaggtagaacaaaatgttaggacgctggtacgagcaccactgaaatatccctatatcaagttttagtcttttcattgcatcttctgaacctgctggagatgctttcacatggaacgtatttgctataaacttttctttatcttttgttcaatgctgtgaagtttgctaatcttaatgaaccaagtctcttcatgctgacaactcattgtaaaagaggtaaaactgtgtttccatggtatggggaatggagaggtataaggaggaagatggatttaaattgatttttggaatgcttgctttattttatcagttaaagaaaaggtctaacggattatttagataactttaggctccaactgcactgatctgtttgtcattcctttaagaaaccattttgattctgactacttgaatttgcacattttgttccttctctctggaataccctaacaaattctttctgcctgataaactacttactcttccaggtcaagttgaaatgttcccttcagtgtgaaaactttcatgactcaaaaaataacaattataataattacaatttgatgagctacctggctgtttacctaattctcacaccattagatgagcgaggtagttttaggctaactttaaaaaggaggaaactgagacttacaagacttgggtatgtggcccaagagtacatagctagatttgaaacccaagtccaaacccaggacttcctgcttaaagccccttctttttcaaaaactacattacctattgattattttgctttacatgtgcttacatgttgatcttcctcagtggactgccttcattccttaataggaaataaattgtcttttttggaggtgttacatttttgcatataacattaataagattaaaattttcatttgttgttgacattctttgcttgactctacactccacgggataggatccttgggcatagaaaccacgaatgctttgctcatcactgaatccagcatctgtcagtgtctgccatataggaattgctcaatatacatttttgagtaaataactgaactaacaaatgagtgaacaaaagaacaaatgaataaaaaacctcagatctagcccctaacaaaaaatacttaaaaaaaagttttagtgtctcaattgtctgtatagacaatgatttcacaagttcacgtgaaatacactaccaatatcaacaatcatgttaaatcaaatgaaatctatatcctctgggaatgcttgtggtatggcttagggacaagctttacttatgaacaatgatactgagacttcacaatagtcagctgtgcagatgtcagactttgcatttcacacatgcttttaacctagagctcaaataggcagttttaagccctggacctcaagtcaatgtggttcatgttttgtcacttcaagatctacaattgaacttcattacgatagtcttagatggtttttcataaattttgagtcatgaaaaactgacaacatatgagtctccaagtaccttttaatatatgcaatattttacctacttaatkaatacatgtgtttatttgataactaaaaagtttataaagtctagaaataaagaaaagtccatgtcctttttcttttttgttttcttttaaatgaaaactcatgagaaataagagggcagaatgcattaaattatttcttctgtaacagcacaattctatatcagattttaaatacaaaagaacatgcaaagggataacagcattgacttcagttctaatataaataaggcaggaaattgggtgaaatcagtttttcctctaatcttacatggaaaaaaatttgtcatttggcaaacccatatgaatccgatctgtttggtttattcatccatgcagtgacattcagactccaaaaactgtatcagaaacctagtcaatatttaaatgccatcatatagattagaaatggaataaggtataggtaacttactgcatttcaaaaaaagtactaattgaaacatattgtcaaacatatatctttttctctctttagaaacctatggctattttctgtctttcagckcacgctacagaaaggcctatttttccttctgtcttagtccattcaagctgctgtaacaaaatatcatagccaggcacagtggctcatgcctgtaatcccagcactttgggaggccgaggtgggcagatcacttgaagtcaggagtttcagaccagcctgggcaacatgatgaaacctaatctctactaaaaatacaaaaaaatcagccaaatgtggtcacaagcacctgtaatcccagcaactcaggaggctaaggcactagaatcacttgcacctgggaaggagagggtgcagtgatctgagatcatggcactgaaatccagcccgagtgacagagcaaaactctctctctaaataaataaataaataaataaataaataaataaataaataaataaatcacgagctgggtggcttataaacaacataaatttatttctcacagttctggagactagaatgtccaaggtcaaggcacggtagacttggtattttgtgagggctcatttcctgggtcatagatacgtgcctctggctttgtcctcacatggtggaaggggcaaggcagctctcttgggcctcctttataagccactaatccccttataagggctgtgctctcatgacctaattatctcccaaaggccccacctcctaataccatcacattggtgatgaggtttcatcgcatatgaatgtggggagggacacaaacattcagactatagtatctgctttttgccacagaatgaagaataaaccacgtcttataaataaaaatctttccatggtcccccaccacataaggacatgaccaacttcctttgctagtcatccatctctcataatcctctccagcccatctctgcagcctcatctccacccacacatgcattctgctgtaacaaatggtgggcaggcttccaaatgtactgtgttcccatgaagttgcacctttgctgatgttattctctttgcctgggtcccctccccatctattcactcctttctgcacttcacccttgctcttcttgtgccctaatagctcctccttttgtgacacatcaaaaattgcccactgtaggaagcccctccaagactaagagtgcctctctctgtgttcctgcatgtgcttttggagcccttatcacacagttgctctagaattgttagcttgaccacactgtgagttttcttaagggcagggacttattcctctttgcatatctggaatcttacccagtgtttagtacatactacatgttcaataaatatttgttcaatgaatcaatgaattgataggttttcttttagtagaaggaataaggtacattttttttagaacagcatccgaaaagcaagcaggaaaaattgggacatctttgcttaaggtaaaaatgcttttatggggaccacctttgaaactccatctacttggatccttttagtcttctttatgagataggaatattaattcttagatccaattaaagaaggtctagttaccaaggaacaaaacaaattggtatagaatggactttcttataagagagtcccaaatcatagatcataaggacaatcttatgttgaaatgtctcaataacttccaaatgccgatgtgaatgatatcatcaaacagtgtgagtcaaaggaagaaatgggattcctaagttttcattgtactccttgactattttattggtgtacagtctcttgacaattattttctcatcttctttcccaaggaaactttagatttaatatgtttattctgcaagatgtttggagacaggtatacaccctaaaaccaccattacaatcaatgccataaacttattcattgcctccaaaagtttcctcccatctttttgggtttttttgttttgttttcctttcatggtaaggacacttaatataacagctacccttttaccaaatttctaagtatacaatatagtattgttgattgtatacttatgttatacagcagctttccagaacttattttgcaagactaaaactttgtaacccttgaccacatctaccaattcccatcttcccccagcctctggcaactaccattctactttctgcttccatcagtttgactattttggattatacatgtaagtgagatcatgcagtatttgtccttctgtgtctggtttattccacttagcatgatgtcctccagttccatccaacttgttgtaaatgacaggatttccttccttttttagggctgaataatatttcattgtatatgtgtgtgtgtgtgtgtgtgtgtgtgtgtgtgtgtgtgtgtgtgtgtgtgtgtgtgtatatatatatcacatttcctttgtccattcatctgttgatggacatttaggttgcctctgtatcttagctattacaaatatgctgcagtgaaaatatctctttaagatccagatttcagttcttttggatatataccaagaagtgggactgctggatcaagttacttcctgtttcgaaagtagggcaccctctggacatttctacaactgaagtgattgattcttacttttggaagtcaggctatttgttggaatggtggggaaaaaagctagagcttaaaaataaatctaaagttggagaggggattattactgatggatgcattaattcaagggttactgatactctaaatacatttttaaaagttgtttgattaacaagtcaaaacagatggtttaatgacattttagagaggtttaatagagatccaactgaattaacaaatcaccatggtgtgcagaatattgaaaattcaccactagtagatttatggcatatttctgggtatttcattcccatttggtttattatgataaatcactgggaaacgggtagcctgtaggacatgacagcaaaccacactttggcaggaccagcatcagggctgcgtgcttttttaggaggctatgtagtctagctagcacagagtgacccagtgagagcttggttggctaggactttctggtggtagcccacagagctcacctgaaagagtaccaaggatgaaaatatcatcttggctaattggtctgctagttgatttaaaaaataaacaataaaaaaaatttccagtgtattttagcaaagtttaatattttgaagggggcagaaatgtagcatattttgggatcttaaatctgaatttgtgtctttttccagactttgtcagtgtctttgtctctctctccctctgccccctccatgtctccctccttccctccctccttctctctttcctttcctggtaagtatactagaaaaaagtatatttttttctcattttttttaacttaataacaacagcaacaatgacaacagtcaaactcttgaattctggtcacaatccagatcaataattttttccttgtagttaccttggaattaggttcttagcccctcactgctctctgtatatttctgtacaatattcatcagtttaaataagtacttcaatttcataccaaagtgccaagactatcctattttcactcatctttaactttcttctttttcatttcccacacccctgccattgccaaacaaaactgattatctctgtttttatctttcttttagactttttaaggcaataaaaaattggcttgctcagaaggctgatacactgagtgttagaataacccaaaggttagaatgctttggtcaacttatgggtatttttgatcacgtatatccatttttaaacctgccattcatgatggatcactgaccctggccctggccctgacccatctcaaaaagttactagcatgattactgattaacacttagactgttggcttgaagtttagtagcctgaaggaaaatttccagaggcattataataaggaagtttaattaagagttaatgttgactcaggaatattatgtatagcattgatccacagtgttgctaatgaattcattatgctgcaaatgcaagtgatttgttagtacattggccaataaaagtgaaatctgtctcaacaagaatgttgaaagaaagaaggcagtgaaactttcatctccactgggagtgaactaacttgccaaatctgggtcatcaatcatagtaaaatgttcaaaacaaataatgcatctttcatggttcactgtattcatcagcacttttgaagtcaccagtctagagtagtcgcctttggccaagttttcagtagcctgtggtttaggcaataagcctcaactgtctttctcgaggatatgttcccaggtggttgtactccatgggccattttcaatcaaatctgaaaggacaaaagggcagttctgtttatatgaaatgacatcatattataacctcaaaattgttgtcttaaaagtcaaatcattatctaaaaggtctcttagaattacttagagcttgaatgcaaaagactgaatttcccactcacgtacttcgccaacactcattacataggcaaaaaagtatagtaagtgtcacttatgtgagcctatgtatgtatgtagtgttatagggggtgggggtggcaggaaagacagctcaaatatgaaataattgaattattcattgccactgttctgattgcctttaaaaaaagttttatctggaagttatttcagacacactggaaagcttcatgggtagtgcaaaaaaaaaaaaaaaaccacatgcattcactcattgtaaacattccacctcatttgcagtatcactctatgtgcacatacacacaaatatacatacacacacattgtctttttttctctgaaccacctgagagaaaactgcacacatcatagccctctatccctaaactcctcgatgtattcctcccaagaacaaggacacttttctgtataactatagtctcaaacatctgattgcctttgaattttatagcatgacttatttatacctttttacttcgagttctaactcagatactgagctatagaggaacagctcaactattagttgagggatagctcagatgtctgatggaaaaaagtcacatcagtaacattttgaattctgcaaatatacacaatatgccaatgtatgggagataactaaatactggttttagagaaaatagatgagttaatacaaatagagattccccttaattaatagatcttatatgtttggttatatgtcttatccatgctattatagctagctagcattcattaggacagccagagaatcttgtctttctgtatttttatactgtttttcttcttctgatcagccgattccaggttttgaaagaatgaagtagttcctacttagataatgctattgccttgctccttaacagtaagcagtggagaagcagagtggacgctggtgatgctgcctttagtcctggagggagtgtcaaccagtgggtaatcattctgaccctgcaacacaaccatcccttcactatttcagtgaaggtctctacttcggtggtaggtctctactcaacatggtacttatagccgttttatacttgctatcttaaaaaaatatgcaggctttcactgctgtgaacagataattgatatttatgtttcataatctgtgaagatagctaacacatttctgacagttgcaattttttttcccaaaacgagtttgagcatgcctatccctctctacccaagtatatttaacagcatttctatctattggggaatctgagtgaggatgacaacgtgtcagggattagaatggacaggaagagtctctgtaagaggagggtgtgatgctggagcaatttatgaaaattgggtcccctggtaactgtagtgsatgttatacagacagtcctgcagagtcatccacgaggctgactcactgacaatgtacacatagaggtgggcctcgagtgtgtgcaaataacaagtttactactgcaggcaaactcttcgtttattcatttgacagatttatattgaggggcactgttctaggagctggggatttggtaataaataagatagtcatggtccgtaacctcatagagcttacacataaactgttttgctttaaaatattgtacattcagaggtgtttgtgctccgaccatatgactgcaatatgtcatttgataaacctttcaggcatgacttggacccacccagaacttagctttaaagctatcagattgacaggaggagagaacactggctttagatgacaaatcatggaaataattatgaaaagaccatccagtttttaatgactttacaagaatagtgttcttgtgagactattgaataagaagaaatatatgaacatttgtatcattcaactgtctaactgataccaacaccaataaatatatgaacatccttattattcaagtgtctaatgagtgagggacagtgcctgtaggaaggagagcctcccaacaatggaagcagtgttattcttcatggtagggagaccattttttggttcctcacaatgacttccaggctggaatgatttccaagtagggcagggaagacaaatatctgaagcctaagggaagctccagggtgattcttgtagttttgtttggcagactttctaaaaagcattgtcagatagttttggagcaagcagtttagccatctactaccacacaatatattcaaatcagagtaagctggaagaaagtcatccaacatccaagtctcagcctggcctatgtgaacatacttcttcttaagactaagctgtaggggtactatgcttattacctcggtgtgaaataatctgtacaccagcaccccatgacatgcaatttacctatatgactaacctgcacatatacccctgaacgtaaaatttaaaaaatttttatagatatgttaaatttgagatgtttattgaacatcaaagcaaaaatggtgaatgaacagatatatgacacaaaaaagactaaggtataatcctatatcatgagtgaataggaattttttgttattggtgtttgcgttagttgagattttattcagcagtaaatagagagatttaaaatagaagtggcttaaggaagacagatatttctccttcatgtaaaatctgaaagttggcagtccgaggttaatatggcacctctatccagtacagtcttcaaggacacgtgctctttccatcttattgcactgtgaggtgtagcctctgttgctaaattcaactcaccatccaatatggctgctccgactccagccatcaacttcacattctagccagtaggaaagagaaaacaataaatacaggcagataaaaagatagatgacaaatttctcttaagggaagtttctagcacatcatataatatctacataacgcttctactaccaactcattcaccaaaacttagttatatggcaacacctggcaaccaaggaggctgtgaattttctctattttgggcagtcacatgcttacatgaaaacaggtatttgaaaacaagtgatgaagaaaagcatcaatattaggggacatttagcagtctctgccacaatgttgcctattaataatcctgcatacattttaaatatttaatatcagtctgcaacactctatttgcaaggtaatgtatagtataatctttaccatatgaacttagtagccatggtgttcaggaaagttgtgttattttgtgctagaatattttacctgccctaggtaagggcctaaagataaaatgtgctagactaattaattttaatggcatatagcaagagatttccagcgttaaagattgcatctccacctgcaatttgggaaaggaaaaactgatagcacaaaataaaagtagtgggtgtcctgaaaactgtctgatgctcttcatgttcttaccaactcatatcctcatctaaatttgaatcacaggtacattctgaccttgtcgtagagagagtcctaaagtctcacgagagaattaccgtgcttgttctaacaagactgtgttccagcaggcatgccaaaatttgatagctacaaatagggagatttgaaaggaaagaggtgggagaggtaatttcttttaactcaactgcatctggtggattaaggtagacaatattaccattttgctgacagaaggcagacatggcactaaagagggagaatgagcaaccacagagctgatttaatttccagtggggtttatggaagcaccaaaacatgatgtagccaaatgttcctaaaagtatgaagtaatttaatttgttccatcattacaagaaattaaagccaagcacaattacatcccagtagtaaaaggaacccgctgaattgccattgttattgactaaatgaagtgagatttctgattaccttgtccagcacattttaatttctgtctgtccatttattccaaatcacattacagggccttaactgatcttgacaaaataagctacattattaaggtgcagtttaacctgagaagctttaattactagattagagttttcaaatgggcatgtcttctagacttcagtacatttagggatgtaattattagagattctttgtttctgatgtgcaaaagagacccaagtttaaaaggaagacttaaacttacggaagtgatttttttttttcttccaccaagagtctctttgtagacaggtgtctgttctgttgggagtggacttacacctcctgaatgctgtgattgagagagctgcctccatagtggaaagcccccggtagagggtagtacccagatttccaaggggaggggagttgggggactaaacgatgtacagtgaaccctctcataagtagggtgtctagatgatttagcattcaaaccagaacactttttagaatgaaaggcaatgctattcataattacactggtataacaggcatagaccttggaagttccaggccaattaggatgtatggactctgtacctataaggaagacaaggcaatagatatgtaaacaaatcaatgtgatagtcattataggcatctggagaatgaaaggctctataggacactgtgggtgggtgggcatggagaacagtcactctcttagggatttctctcccctggaacaaaagttacactaatcatgtgacatctcagagcatgaagtttgtagctccctcaaccatattcatattcctctaacagtccagttaatgattctcagatgcattagaaactatggaaatattatagaaaagaagccttaacaggggaagtgtttcatgctttttcagttccattcaacaaacatttattggatacctagtatatgacagccagtgtttagcaccagagatcaaaaaatgaattcattatggttccagccccagagaaattcagtctagtaataaacacataattgtgatagactgtttagtgatttaataacttaaagagttaacttctgatttggttctcatgcatcaaacataatatttgccagtctctatctctacaaggagccctggatttttcccagtcccctactaatgctagataatatggcaaaatacacaggctgatcaggctgttttagagactcttttaagcagagatcttttgttttccagactgctaatttatttttttctacccagaaagcccttcctaccatctgagctattctgaccaaatcagcgaagacaagctacagagatttaggatgtctgggctaaaaaggtttgcttgtttaattagataaataatttgagaatgctttccaggattactgttcctaaccacattgataaatgctgggaagactatctcagttatccagcattggataacagactgttggagaagagtgaagcttcagtgtgagctgggaaagatcccaaaaatcctaacatgctctaggtgcctgcatataaaattcatcatcatagtgactttaggaccacttgctatttttcaggcactgctttacatacatagtcctatttaaataattttcagaatcatactgtgatataggtactgctttctccattttataaattagaaaacaagctaggttaattcacttttataaggtgccaagctagtcaatcagtggcaaagctcagatttggaaacaaggactgccttactccaaaaactgttctcttaaatttcagtgtttgtaaggtccctcactgccccagcataacccagcatttggtccattcaaggattaagaggaacagggatctgccagccttgtttctgcagaaaaaaatgggggaggcagagctggatctaaccaaacaggttaaatttaagtgccaggtttccgtgaaggagaattatgccagcaatggtttctcaccttaatgaattcatttctaaccattctttgccctgcaaagacagcaggatcctgggtccacagggcccagttcatggagaggagaaagaggcacataatgggagcaaaaagtgaagaattcaagctgcaaaatgtaacggaattctcaaagtgctgggttctcttcactcccttatctggcagctcctgttttttctcctttgcctcccacagttgccactttaaaaagtcatttttaatgtggcacatatacaccatggagtactatgcagccataaaaaagaatgagtttatgtcctttgcagggacgtgaatgaagctggaagccatcattctcagcaaactaacacaggaacagaaaacgaaacactgcatgttctcactcataagtgggagttgaacaatgagaacacatggacacagggaggggaacatcacacactggggcctggtgggggttgggggagcaaggggaggaagaacattagtacaaataccgaatgcatgcgggtcttaaaacctagtttgggctgatgggtgcagtaaaccaccatagcacatgtatacctatgtaataaacctgcacgttctgcacatgtatcccagaacttaaagtaaaaaaaaacacaagaaaacaaacaaacaaaaaaactcctttttaaacattgtctcagcgtccagtcggttgagtttctgcacttttagacactcaagccccttctttcgtcctttgctccagtggttgtagcttcctacctccttcttaccctcacccctaggcttccactttagagaatttggagaactggggaaagaaaagactgttttgtgcatggtgtgcctgcagcctagtgccatgagctggttcttgccgtgtctgagccaccagatccactccttctgtggttcacacgctattccctctatcccagccaagcttgcaaactctgatcatgaactaccaggtggaggsggggcatggatatcctccccaggaagcctgtctggaacctctgaacttttctgacctgtgcatgcctctaccacagcacaccttaatttcttttgaaatcactgcatttgttcatttgttagttgtttgcttctagatggtagacgccttgaggccagaattcttctgaactaagctttggaagttgagcacctcatagaataccaagcttctcgtattactggtggggttcaacaagtatttgttgagaagtgatgaatcaagctaaagtttaagtaggcaaagatgaatcacgtcataacctctggtttccyaactttgtctatagaaaaggctccttgctaggtaaaacaaaaacagaagaagtatgtggattctcttcaactttgggactcatcaccctgaatctctcagttatctcaagactgattccctccaccctggagggcctccctgcccctcctttgtacagcagtgaaaggcagaaattgaatagaaggagggaaagagggaaaaaggtctagatgatcaagtggcaaaaacaaataacccagcatgaacaagtatgcagagagggaactctgaggaaacttgctgacaaaagatagagatggaggtgaggtcaaccacaggggaataatgggggcagacaagtctaaggaggtagattttatagggacttcgaatagatgaactgaagtttggggaagacctaaaggcattaaaaatccagtataagttcttgattaaggacagatatcataataattattattataatacaaggggtgctttgggaacataggctatgtaggagggattgacagaggaagggaggaaagatctaggaaaatgagggccaaacggaaaggtgtccttctcctgttcatttgccaatgaaatgcctaggatatatggtggtctgctcctaccctccacagttctagccactgcaaccaggatgcccagcaaccatgtcattcattcattcatatggtctatctgtctcctataggcatttcagtgagtggccgctgctttatgtgttctgttggtaaacttgtagtaccctgagaaaactcacacattatggagaaattacttcaaaaaatatgcacagtagttaactgaaatctttttatgtgttctactctcacgtgaagtagagaagtagagggagagttttttaattataaaaagggaggaagagggaagagggaaacaaaactaacatttattaagcaaggtaatttcttacctcagtgttttcaaaccaattggtagatttcaaaatcaatttaaggggtcacaattaatactttaaaattaaatwaaatagaaaacatcagagtgaatcatacatagtaaggataaatgttatttcatgttaaattatgtttcaattctctgtattggctcgaatatatatttactcttatgtgtatggtatatactgttcctatatatacatttcctttttattttatatatataattctttttattggtttaatttatactgaaatgcatggtttgttaaagactgtaaacaaattttgccatgactattatttataaaacacaagagtttctttaaataggagtccactgctctcctctaccttttaaaaataaatataggtataaaacctttttgtacattttttttatattactgaaagccagcatccacatgccttcaaaagtgagcacctcttactttaaacaaatctaccaggttatagtataaaatataaattttactgtagtttactgtcaataaactttgtaagccactgcttcatttcatttaaacttccccaaaaccttgtatgagtggagtctggggattcagaagaagacggtggtcatcacagaagttgaaattctctactgtttacttcttttcaaaggtcttgttagcggtggccttgaaggtgatgaagaaagacactttcaaggtggacaggtataattattgggtcaccaagaacaaatttgaaaaacaaaatatgccaattgaaattagcatgtagcacctaaatacccagaagcttcttcattgaataatttattcattgaataaattatgtaaactgaattagtaattcctagtgaaatagtggatgaattgagaatagtggtattggtaaaaatggaaaaaaatttttttcttttgagacagaatctcactctgtccctgaggctggagtgcagtggcacgatctgagctcactgcaacctctgcctcccaggttcaagtgagtcttgtgcctcgcttgaggcacaagattagatttagtagagatggggttttgctttgatggccaggctggtctcaaattcctggcctcaagtcatctgcccacctcgacttcccaaagtgctgggattacaggcatgagcgaccgtgcctggccaaaaaaaaaaaacaacaacaaaaaaaaacaaaaaacaaaacaacttaattcataaaacttaattcaacaatttaagagttatacttcaagaatgaagatatataatgaaaatatgaagtcttcagaaggacacacatataataattttagtaaatctcaaatttgtctcaaatcaaaaacttgctacacatatttttgtcttaattatcataattaaaaatgtctacacattacataatactatctagtaaatatgccctagagattgtgtgtgtgtgtgtgtgtgtgtgtgtgtgtgtgtgtgtgtgtgtatgtacacccattatgttttcagacaattggaagaaaattgttaggcaattgtttttcttttatcaaggagctgtcatttaagtgcaaagctggagtattcaaaataaaatttgggcttacaagatcagggcatggcaagacctatccagattgctgtggaataatatatgcttccaaacgctaatcttaaggatgaaaaacacataaatgacatgccttcttccccttgcttaccttagtgactacagtttaaataatctaaaatagcagataccatcaatactgttgctaattatgctacttttcagagaggtacaagagtccttgtacctctagtagtagtgataccactactagtatcaaaaatacaagattgttttgttaattttgaccatgttttaaaaaaagatagggaggagatgaattactattaaaagcagctcttatattttacatgtaatagatgataattacaagtttttaacaaataacacatttaagttgaactgaaccgccaaaaaagatagagatatgaatatatgatttttagattaaagttagttttaacattcaaataaagtgtgggaaaatggcctggaggccaccttctagggaatgtatttttagccctattttacaaaaaagaaaactgaggtacagagaagttaatttgcccaaatttgccccatggttgctaagttgcagagccagcatttgaaccactgttcccaagtcatactctttctattgcttgtaactgtcatcgtagaccactaaagtggatacctccacaactctttgctttccactgcatctggactaccacaatagctccttagtctccatccttctctcttctccattctatcctcttaggctaccagtgcacttatccaattcccacaatatccactagctcaaggccacacatttaagtgttcaactctatatcccttctcctccctggaatgtgtctactccacccagcccatttactgtccacacatacaacctttattcaggctgcagacatttcctacacctgaaaacaatgccagcggactccctcctcccacagccattaaaaccacagtcttccttgaagacctacatccaagttcaccttcttcctgaaacccagcacactgagctatagtccatacctccctctccctgctcgaactacagtagcactcccaggctgaatgatttatatgctaccttacactgtctctaggcagcagccgatcatgtgtctgattttctcagcaggttattatggttccttcctgggcccaggctgctgaatctttcatgttcttgtatttcacagcaactatcacatcagagaggctcaataaatatgtatggattttttgactattctctttcagggggaaaaaaatgagagaaagaaaagaagaaagggagggaggaagattactctctgaccatttctcgatagcatacaaagtcaggaggaagagaaataaaatgtcgttagtggagatttcaaccatatgggaacctactaaacacatgtatttgttaatgttttggagttacctgacatataggtataggtataggaaaacctattccaggtattcttcaagaggtgatagttgttgtgtgaaaaatgcattctaaaatcaaacaggtttagataatgcttgttaataaaattaaatatctcattttgctgtggaccttctagcttttggtaggttcgtgtccattagaaatcactgtaaaaagcctacatatacaatatttcccaagcttgtttgaccacaaaacgtcattagtaaggagaatcttataaggacaatattgattggaacattctttgggaaatgtttgaaatgatcttcccagtaacctcagtgtaagtgatgctctgtcattaaccaatgacaaatacatattcttcctacatagttgacttttcatgatttggtgtggtcttgtaaaagctattctattttgttgtttgtttgtttttgagacagagtctcactctgttgcccaggctggagtgcagtggcaaccatctcctccacctccagggttcaattgattctcctgcctcagcctcccaagaagctggaactacagacatgtgccacacacacctggctactttttgtatttttagtagagatgcggttttgccatgttgtctaggctggtcttgaactcctggcctcaagtgatctgctcgcatcagcctcccagagtgctgggattacaggcgtaagccactgtgcctggtctaaaagctattctaaatcataggttgttcactcacatttggctcagaactggttaatatttgagggttgatggtgatgatggaaaaatagtaactgttttaggattgagaatctgtggaaaaggaaggaaactctcaaatattaactaccttatttaaaattaacttatttaaacaactctgcaaagtggttcagtatacctactattgattgaataccttctatatgtcagatacagcccttggtactttacatttcttatgcatttctcataataaccctgtaattctcaatgtatacaatgtgctcaggtcttttaaatggcttatttcagataatacaactagaacaatggcaaggctggaattcaagttctgagtgactcaaaagtccatgctctttctgatctatcacactatttcccatgaagagctcttataggttgtggattcttctgtgtgtataataactttcttagccaaatctaaatctccatagatattcttgtaaaattataaaactaatttatcttattcgtgtatggagccagttcatatacaactggataagccaaatataaccgatatactcttgagttctgaaatttgttctctataatgcacacacagttaacaaatgtaggtttaccagtaggccaaaatagtttatcactcatatgtgttgcttgtaatgcaagtaatgagattaaaaattgtacataagaaattacctttctgagactctgttcatagcctgtttaaaagggcctagtcttttcrggaaatcttttgtgtgttttttcttttctttttctctttttttgggacagagtttcgctcttattgcccaggctggagtgcagtggcacaatctcggctcactgtaacctccgcctcccgggttcaagtgattctcctgcctcagcctcccaagtagctgggattacaggcacccgccaccatgcgtggctaatgttttgtattttctttagtagagatggggttcatcatgttggccaggctggtctcaaactcttgacctcaggtgatccacctgccttgggttcccaaaaggctgggattacagacatgagccaccatgcccggctgtgtgttttttcttaatcccagtcttcaactggacaaatgtctctttggcattacttcttaacccttaggtatctcatagtgagagagatataaatgctaaacagagatttatgagaaagttaaaaaaaagaagaagaagaaagcagagatagcgattccgaataaaagattctggggcagtgttgattaaaataattgctttcttttcttcactcaggaaagtattcttaacttggagtccttggtgacttcagggaagtcagtgaacacttttagagtgaaaaatattgataatatgaacttatgctcatttttctgggggtgtttgcatcagatgcacctttgtgcattcatctgtttctcccaaacatcatactggtgtattggtgaattcttttaaaattttactctattttgtaaggatcattacatatgaatgatataccataatacttgtcatttttattttaatgttaatatttcacttcagtaagacaccatgatctgcttgaccattaccaaattttggcaatgttagttcctaatactcttttaaaaaaagagaaagagtttgaaagcaaaagactgagaacaagagatagacgagggtgattacatgtaggaagccacacccaggccagtattactgtttgaatctcrtttggaaataaatattcttatctgatagaaaacaagcatacttactgattattcactcacaaatatttgctgagtgcctgtaaatgtcaggaattttctagacagttatagaaaggcctagacacaaatataaaaatgacattagaaaagtcatacaggcagaagccagcaaattatttccaggtggaaagattggctaagatgggcagtcttggatgggatagtcttagatgtaaataaaagggaaaggtattgaaaagcagccgaaaaaggcctatgtgaacagaagtgtgacattaatacaataagtaggagagagttgtgcagcaggttcttaaaagaatgaaacaataaaaccagggtttaaggaagattattctgactttataaataggactgtgttgagaaaaagtgaatccaaggagatccagtagtagaccattatatgaatctagaaatacacagatgagaatttgactgaaggtgacagttacagaaattaagaagaaattggtaagtcaactggcaaagtattggatgggaatatggtaggggtaggagtggagataagcagagtgagtgtaaatatactccagaactttctatttattaatagctttatttctgagaatacctcaatttcaaatagaaaacatgtacccctgaagaacagttgagctaaactcacagaattccaggatcatggtattggatgggatccttgacaagtaactggtcagtttaggaattccctctacaaacatagctgaccccatccaggctaactataatgaacaaccttaaaaccaacacctaacccagatagtacaatttcagaaatcagataataaatgaatgttagagctgggtaggtgctaaagataatctgttcaaactccttgttttctctaaggaatactgtatgcagtaattgacaaaggtgaagaacaaaagactgttatatcctaagattgatagtatatgatggaaacacagatgctctcctacagtccccccagggaaataaaattgattcctaaaattacaacaagaatacgtaaatagcatacataattgtaactttttttaaacctgtttgcaaaaattgtcctgtaactttgttcaaacaacttcccagacaaaagcttcctcagtagcattctttaacaccctctttagtcttgtgttgctgaaatatgtgtttggaatgaaaattatcttagcgcaaacctgtgggtatatacggtctgtactgaatatcaatggcaaagccttgatatttgtcttagctcaagctgctataacaaaataccataaactgatggcttaaacaacaaacwtttatttctcacagttctgggagctggaagtctgagatcagggtgtcagcatagtcaggttctggtgagggcatcttcagggttgcagactgcccacatagcatgtatccacatggtagaaagagagcaacctctggcctcttcttataatggcacgaatctaattcatgagggctccattctcatgacctaattacttccgaagggctttccctccaaataccgtgacaccggggattagatttcagcatatgaatattggagagacacaaacattcagtccataacaatattttcctttgacatttcctttttctttgctcctgagagtttttcctcctaactttctgcagcttctccttccccttcagggactgcttaggattttctccttatctggtcaccaacctcttaactggtctttacttttctgatctgcctttatactattcccagagtaatctttttgaaaagcaaatctgaccatgtgacttcctcacttagaagatttttaatggcctctttagaagaaaatattgtcttagaatagtatacaagtcctccaagactagttctccatctttatctttgtccactgtctgatctaaactttatatccctacctgtttgtagcttcctgaatggcctgtgttctctaagtgaacttcttcagaatgaatccctgttcattccttgaaattcttttttctttctaactaccctaaaaactgttccaggtawctattaagtttctggaccccgaggttatacctaggtattagttgataggctcactaaaattaatagaatgtttgcatttaagttagagacttgagtccaggagaaagtgaagatacaatggaggaggaagggaaaagaatctattaggcaatcaatgcaagattatttaactcacaacctctcacttgaactaaaataacttacaaggctcttgttattatctccaatctataggtgaaataaggccctagaaagattagtagctgaattgcctggaattgcttgtatgaagtggaatagagattggaatctttctccactcttccagtttctttcaaagaataatatcactcacagttgcacacatgtcacatgaagcccccaacctagatgcctaattaaacttagctcaaactccaattttttggacaaaaggcctccttattcttataaaagctttctcctctttctttgactcttctcttatgtcagctcagagagacatttctgcttgggccaatctggccttcaagctcagtcccttcaatgaataaaacaaaacaaaacaagtcgggattttgtaccttcagtaaccttattgacgattgggagaaagggaaaatgcacgggttggagttaccctttagaccaagctgactcctttctcttatatgcacacacacacacacacacacacacatcttcaataaccttattgatgattgggagaaaggaaaaatgtacaaattggagttaccctttagaccaagctgactcctttctcttacacacacatacacacacacacacacacacacattctctctctctctctcactctttcatgcccttacatacatgcacacacagagaccaagctgactcctttctcttacacacacacacatgcatgtgcacaaacacacattctctcgctctctcatgcgcttacacacatgcacacacatacatattccctctctagcaactggcatattcctcccctttcctgtgtagatgaggcacagattagttccacccaaaccaaagctcttcaaagtctcaccttctgtcataaatagctttatcgaacattttaatgcaggcagactctcgtgaaagaaattctggtgaattccattgtttttttctccatcttattacagtatgattaataagttagtgactacaaggttgtagtttttaagagcaagaagtccactccctttcaagtcacattgggcagtccttctgttcatacctgacatattgtgggaacatatgtctgcgtaggattttaatacagagattgtcttagataagaataatcgtcagagaagcaaatggtctataagttatttaattttattcttaatatggtcaaagataatggttgcactgacttcaactttactttcttmaattccattaattgcatagcactagaattttccatataaaataaaatcagatcccatgtcacacagtactctgagtcactctgtgactcctactcttgaagatatagtcctacctgcagatgcctgacatggccagtctttgagatggccagtggctgaggatttctcagatttctccagaatctgttcccctaagcaaggccctactcatggttatttcttttttgacacacacatcttttttttttttttttttttttttgagacagagtttttatgctcttgttgcccaggctggagtgcaatggcgcaacctctgctcactgcaacctctatctcccaggttcaagcgattctcctgcctcagcctcccaagtagctgggaatataggcatgtgccaccaagcccgactaattttgtatttttagtagagacagggtttctccatgtggatcaggctggtcttgaactcccgacctcaggtgatccacccacctcggcctcccaaagtgctgggattacaggcgtgagccaccacgcctggccgacacagacatcttgttcatcataggtctgtgtgcttgctcatcttttctcttaaaaatccttcccactctcttttatttcattcttgaggactcagccttttcccactccacctctgtccctgtctgatttaaatagtcctcttttactgtcccatagcccacatgcttccttctgtgagagtgcactctacagttgtttgctgaaattacctcctctgctggactctgggtaagggacacactcttttcatcatcttgtttctgcagcctctaataaagtgcatggcacatagtcagtgctaaataaatgttgagttactggtgggactaaaagtcaatgaaagccaacctcatgtttatttcatataaaaattctactagaggcataggcaacattcggaaaaacaattgtagttagtgagaagataaaagaaaaagaaaaccgtcacaaaattgcacacatctttcctttggaagctttatgaagtactaaataaagttttatatattttatacaattttaaaatacttcaaaacaataatttgatgccagaaatacacttggagatgagagcagcttgccactagcaaactctgcttaaacctattacatgtacacattgaaagagaatccaaagccttcatgtatttcccatcagataaaatgtatagaggaaaaaaaattaagtcagcaaaagttagacctaacctacacaaatcttttactgtagcaaactaaaggaatgactagctcaaagcaatacacggtgaaacagaaatcattttttccagttctatctactgtagacagtatcaattccttccktagaacaaaggggaaattttgtaagaattaagagaagagaagctggaactggttagggagatttaagtatttgctcttaggagctttttgttgtagttcttttatttttaaaaaatctggatcagtgctcatcatgactggccatcagagaaatgcaaatcaaaaccacaatgagataccatctcacaccagttagaatggcaatcattaaaaagtcaggaaacaacaggtgctggagaggatgtgaagaaataggaacacttttacactgttggtgggactgtaaactagttcaaccattgtggaagacagtgtggcgattcctcaagggtctagaactagaaataccatttgacccagccatcccattactgggtatatacccaaaggattataaatcatgctgctataaagacacatgcacacgtatgtttattgtggcactattcacaatagcaaagacttggaaccaacccaaatgtccatcaatgatagactggattaagaaaatgtggcacatatacaccatggaatactatgcagccatraaaaaggatgagttcatgtcctttgtaggaacatggatgaaattggaaaccatcattctcagcaaactatcacaaggacaaaaaaccaaataccgcatgttctcactcataggtgggaattgaacaatgmgaacacatggacataggaaggggaacatcacacaccggggcctgctgtggggtggggggaagggggagggatagcattaggagatatacctaatgtaaatgaggagttaatgggtgcagcacaccaacatggcacatgtatacatatgaaactaacctgcacattgtgcacatgtaccctagaacttaaagtgtaataataaaaaaaatctggatcagttgttataattttttttgtttttttgagtcggagtcttctgctgttgtccaggttggagtgcagtggcccaatctcagcttactgcaacctctgcctgccgggttcacgccattctcctgcctcagcctcccgagtagctgggactacaggcgcccgccaccatgcacggctagtattttgtatttttagtagagccaaggtttcactgtgttagccaggatggtcttgatctcttgacttcatgatctgcccgccttggcctcccaaagtgctgggattacaggcgtgagccactgtgcccgacctcagctgttataatttgtattttttttttaaattaagggcatacaaatagtgtccaaaataagtggtattttttggacttgttctcttcatgtataccaataggtctatctaggaattatgacaagccgatacagtcctttagcagaccttcaagtgttggcaaagaaactaatgtccacatagttacacatcccgtacagtggatccttttacctcaatggtcaacatcactgtgagttgtgggtaagagtaatggactgaacatttcacaaaaaatgacctcaacctctagctaactgctgtggctctgaggtgattacttttttcctttttcaaaaggaagctgcttcttcagcatcttctcctggagcccctggcacagtttcaggccatgtgtcaggggaacctctaagcatatcactgtgacagaagccaagtgctggcccgcaagaattgaggactgtttgttcacagaagagcctcagcagaatgcgggtgttacatagttcaaaggtgccttgaagaaaactgatgctgttgtagcaggggccttcaaggctcaatttatttctcagttgctgttccatagccctctcccagcctttagggagtttagccaatagtttttgcktgggtgtttttctctgtttagttccttgacttagcaagatttggtgcagttaaagagttttcatgtatttttaaggagagccacagtgtatactactctggcaggggttgaggggaagtattttattaatgaatgcagtatgtgttcttggtaaaagccaaaattaaactggctcactgtttttgtcctgctagctgtcgacatttaggtgtgttgcttggtgtggtgactcaatttcctgtgggatagttggcaactccactttgaggtttgttcggcgggatgaaaaggtcagttacttgatgtcttagaacacttggggttaaaattcctaaaagtgaagctttacaaatgatcctgaaaaatcgtggctagctatattgcctactcacctaggaatttggaaaaaagcaatattctcagctctatgctaatatcaagaataattctttatttgagcaacagtttcacagagcaaactttactctgttagtaattattttctcactagcatgtagatgtgttccagtgatttttcatttttcttatttatacagatgttagaacttaaaatatatgcttaccccattttatcatcatactcaaatcctgtctgtcaaaagtggctggtgcatggcttggacataaaatggatattctgaagtaaattgttcctcctgtcactatactaccttcttaagaacaaatcctgtgtataaagtgcatgatgtcttgaagcattagccaaaactttcctgaattattttccacattaaaaaataacaactgaaatataatgtgtggagccacatcctgttagatttgaagcctgagtctgaamagctttgggaacttggtgaagatggaggaagggggcagtttacttagctactgggaaatcacttgaggctcaggctttgagaaagttggagtgcaggggagaggagccacagaamgccgaacctcagaggggactcccagcttcattgtaaccaatgattgaaaagatggcactgaacaaatcccagacacaatggttatgcatctttaatccactggataggctaactatggacagctcaaatgatcataaaacaagtcaatgtcctcttaaaatttcctacattcctatattatgggaatgagagagagaggaaaatatcaaaaccaaaccatatagtagatgcactaccatggcaactaggtgatgctatacttgcatatggaagttattcagtaaaatgaaaatgattgtgttagagccataggcgaaagtattgtttgtgatctttagggtgtggggttacaatggacttcctatatttgtgtgtaatgcttcaatttttataacaagcatgtaatattttttacattcttagaattggggaagctatacagagcaggtattttatatttaccatttaaaattattaatatctttaagcttgttaagggggaaaaaaaagcttcaatctgaaactttaattcacctggcaaggtttaggcagttgtttgtccatctaaagtatatatttacatagactgcggggtggaggaagtagaacaaaaaagaggcaaattttaacctagagtactcaaagtgaacagtaaatagttcaagtattcttgataacaataagccacgtggcacatgtaacaactactttaaaagttactctaacttttacaaagttcacataaaaagctatctcaaaaatcccaggagcctaaattcagtccatgaactttatttgttgtgccatgttaatttatggagtctaaatttcaagggcagaatttcttctccaatacctgtagattcaaagacaaagacaagggatcccaccacttagtgtaagtttctcagtatcttctttccactcgacaatgacaaagttttatcaaatggacccttgggagtttgacttctcctcactatgaatggtttgcttattgcatgctaatgtagaaaagttctcccacaactgatctgcttagggacagtgtccctggtgccctgggtcagcctttgtaaacagaacaggcttttctgtatgcctttgaatatggtctttccgttttctcaaaattgtagtgtactctgcacatggtgggtagaaacacccttccagattttcttccttggcccaagatcatctaggtcttatgcaattcacaggggaaaggagtagtatgcaggacatgcgtaaattctccttaccatgtggttctttcacattgctgttcctttaagagaactcttaggcaattcggcatatgaaaatgcagcctattgtcaaatttgtgaattataaagcgttccgaccccacaacattgtatattttgtttgcttgtttctgtccgccccaacatttagaagtctggtacttagtagggactgggctgggtagaaaaagaatgcggtcttaattcccacaaccctgcctccttgaagtaggtgaatcctaagcctttagaaacgaacccccagaaaccctaaaacttaaaccctcagaaaccttgagggtcctaaataaccttgtttgtgaaacttcgcaggaagcagccggtcgtggagtcgcagaggctccagcggtctgggcaacctggagggcagtggctcggcggggcgcgcggtggttctagcgagacaggtgcgcggccgtgcgcgcctgcgtgccggtccctcctgagccccgcggcgggcgcgaccccggacggcggactgcaggcgctccacgccgggttttccgccgctctcctagcacagacagtcccacagcagccccacagacacacacgctcgcgcccgcgcctcctcgtctgcacttcaaagcgagtggcgcccggctgcgcsggggggatggcactgcgaggtggcggggcccccggggcagagctcgaggggaaggacgcggcgggtggcacggacagggacaggcttttgcaattcggaatcttttcgtaagggggttgaggaggagccaggcagcgccgagggccgagaggggcgtgagggggagtgttcccggaaagctgcggcgttggaagccgcgctgcgcctgccgcccgaggagttgagaaagaaaacaggaaacgtggtggccgcgcacccggccgcggctgattcattcacttcaagtgccgtgcagaaggctcggcaggcggggcgggcgtggggccgcggctccgggttggggaccgaggagatccggctgtggaccagacgctcctctgcggggcgggcacccaagcgcgctcgccaccccctcgccatccgctagagccgggctcctggactgggactcgggcccgccgcacagttgaaaagtcgcatagtggtttttccgctcgcgtcgctgtgtgaaagttggctcgccgctctttgcacgccctccctggaggccgacccgagacgccaagctggagagaccgtgcctccccgaggccggccgccccgcgagcacagcctccgcccccgttgcactgccgggctgggcaatatgaaggagcagccctcatgtgccggcaccgggcatccgagcatggcggggtatggcaggatggccccctttgaactcgctagcggacccgtgaagcgcttgagaactgagtccccctttccctgtctcttcgcagaggaggcctaccagaaactggccagcgagaccctggaggagctggactggtgtctggaccagctagagaccctacagaccaggcactccgtcagtgagatggcctccaacaaggtaagccccggttctgctgtcactggtgcccccaggctgctgattcccatgccggcgagccactggtacccatagccccgggaaataaattgagaggttttttaggcttactgcatgttggctattctgctccttagagggaggttcctgtttccttgctttgcctcccctagtcacgccagataaacattttccaaaagcaatttgacgtgctaaatttaagtatctcccaagacacagggttcctaagtaacactgagcccttgcagcagaaacccagtagggtccatgggcattgcatgtttaaaggtgttcttgggattcccggttgaaaataagaattggtggatgtctgtgaaatcacttgaatgtcaccacctagggcactcaaactcagaagagttcatcgaacttggaaccttcaccctaattcatctagttgtcagggtaccccgcaagaactgagcctttatatattcagttggccatacatatccgcaggaaacattaacagagttagaaggttccttatgatcattacttttgtttccattaatcttggaaagaaagcccagttttttgaggtcatttagtacaaggaggcttcaactaggcatctgtgccatatgtgctaaggtgctggtcttggcagttaatggagttttgagggctgagaagtaaccttcagcctgggacagccttaaaatagcacggaaggcaaggtatagtgttttcagttttgctgtattttttggatttcctgttctttttgtctttagttatgcaaggagataattggaattgtgtatgtttttagtggctatttgcctgtgcatgtcgtatgcagatggctgaaggattcagccagtaaggactggtaatgttgtgagacaattagtaatagttgcctcgtcaagatatttaagtatttttggccacctatttacaaggtcaagaaggttatattatcttacagttcatctatgtgcacatatctttaaatgagtgatgctttttttttttctacctttctatggtttttatcccacctgttctcatgcagtttttacaaaaaggccacggcataacagccacttgattgtcttatctattaacagtgcttttgtaggtagcattgtcaagtgaaaagttggcttcaaataaataaaaggggctctgtagacacggccagcagatactaacctacccatatgcacactgacctacccatgtccacactgatgatcaatttttttgtcatttgtgcctcatttctaaatttggcacagctcctcatcagaatgaccaattattgctctcttactgggacttttaccccctgctgtrgcattaggcacctttattctcatctgagtaacaaattcttagttttataaaatatagtttgttttcataatttgattctcaatagcagtagacatatgctgaatatgtccagtgtcctaactgctaaatgggagcactttgccatgggcctgagttcttaattctattgtgtggttgattctgtgtaagaaaatgaagagcagaatcaaaagccacttagcaatgtgcaagcattagtgtatrttttcaaggtgattcgacagtagtttttcagctaaatgaatttgagcagctagttactttccctaaaatccatattcttaatgttgagatctatgtttggatttaaaactgaatgtgaaatttaataatgtattgtaaatgacttcagctgtcaaggaattaatctatacgttaagatttaaaaattttttaggtcataataattgcctaaaatgattcctttcttttaaaggcaccagataagacagggatttaaaaaaaaaatctttattatgaaggccccagattagactttgagttaatttacaggtttaataggagaggttggtctgtttggttaaaatgaaatctaggtaaagtgagaagataattttttcaaaatgtagtcattctagcaatgtttatgtcttgtggctgaaaaattaggatattttttcctagcccacgacagagctgaattgaaaaattattgctgtcacactaatttttaacattaaacttagctcagcttaagctgttgcttaaacttttaatgtccaagccattcgtgtcttctttaacttatttatttctaaatcagtgctaagcttacatgactgttatagacaaaaaagggttagcacagaaagaaaaaaaagctcttgctaaaggttgtaaagttacccttcttcttcataacaagggcatgaataagccacatccacaaaagctgtaaactgagttggagcagctgatcggaaggcccctgtgagtgttgccacaccttcagtctgaactggaaatgtgtacagcttgcatcatctccactcagttatttgatatttcttgagtatgaatgaatgagtcagaaacattgcttttcagttgttagttttattaccatccattctttttacatacacgtgttcaaactgatattttcagtttattctcctttagcctttgaaaaattatgacagttttctgtgttctctcttgaggttttaaaaaatttactctaatagattgaaaagcacaataaaaacactagtaagagatcaggatttttaaatggtgatagagaatacttattatggagatggatttaggtattaggaaggaggaaactgattcctcaaacccatttaacaaactgggttaacacattatttctgtttcttagacttctcaataaaaggcatcttagccaattagcagcttttaaatgatgctctaggagcaactagctgtatttcctgtattggtattatatatgtttcttgcttgttgatggcattgaagcaggaaaattattgaattcttggccaaggctagggttggctgtaacacatgtaggatgcttgtaccaagtagggtaagagattccagatggcatttaatttgagtgattaaatctatggcatttacccttataagcacattaatctgcctgagatttgtacagatttcctttggaacctcattgctacaattgagggtaattttagtgaggtctcaaagctttggaggcaggcaaacctggaagttgaattatggttttgtttcttgctaatggagttacattagagaaatgacttcaattttttttagcttcagtttccttagcatacaatgggcaccataataactatcttgaaaagtcagtgtaagagttcmaaagaatatatacaaaagagctagctaatatagtatctgacaatagtaggcactgtatctgttgttattgctattatttgggttttaggtcaaacttcattggttgcctacgtggctaaaatgtctttttaccattcggttgtaatttataccagacacttcaagtttgatggatttttataattcttagataactgtctatagcrcacatttctgtatcataaaaatgcttaaattatatttacagtttttgtggtataatacagacatgaacattctgaagttctaattagaagtttaggcttttcttaaattccagttacagaatgccagacagaagagctaactaagtacttttcctgttttactctaaaactgaaaatgcagaccttactaatttttagaacatgtgaaatgtaataagggttagtggtcaatgtgccttttcagtaaaacaccttttaagcagaatagtttcaccatgtttttggttacctttctctcatggaaagtatattgaggatgggagtcagtagagaggagagcaggacagcggcctgggcctcagggctttcaaggattatgctatggaaccctgtaacgttatcctcttgtgacctaataatgcacatttcaccaggccttccctgtaagttcagtgaggttcaaaggagaaaacgaaatcattttgagttattcccaagacatatcactataaaaatgtattttgtttctgctctaattttgggggcagtttgaggtttggcatggctggaaatgactgtgtttcaagctgaaagtctgtcttgaagttagaatccagaccctttctaagagacttcagatttttctatacttcattccaaatatacttaggccagctttacaaatgtggtcatgacttctttatggaatttattttgtgtatttggcttttggcaaacctctctagcatgtttctgttgcctataaattaaattgctttgctgggtgctttgtctcagagctttctctggctgctccccctactgctttgtaatagtcaatgcagaacatatagtaggactttttgttgatgtattttcttctgggcaagaggggtgttataacaaatataggatcttcatagaagtggctaaatcttaagatatttccacattatgcaactacagtgtaactcaacagatataaatgttaaacttttgctaagaaggaaactaagttaattggaaaaggcatgttagttttatagagagaaaacagcctcagttgttttctacattaacatattaaatcttagattaaaaaagtgttaatatgcctaaatacaaactttaaatttcaaaagaaaatatcttctataattatagaaaatcaacatttagatgttttgagttcgatatctgctttttcatctactcaataaaggtagatttgggaaagatttatgtagcttacatgtagtaccttaaagttaatatgaaagattgagaatcctataatcactgttagaaaaaatactttctttgcttttaagtaataatggaagagggaaacaattttaaaggaaatttttctttcactgaaaagtagagcccttgatgttaccttagcataaaacttaggattaaaacaaatcttaacttgtctctgttgtcatccgttcagttcctgtgccagtatttagtgaaagtttaattattcccaacatttaattatcaaaaactcctaatttttaattattcaataaattaatcattactagataaatttctttttttcagttacattttgacttaatatttggggtagtagtggtaacttctgtctgagagcattatgaactgtctacgttttcgaaaaaaattccgaaacataaggattgcccatgataaaagaagtattttttctaatgttatgggtagattaaacaaactggtatttttctagagagaaaggatgatagataatgcttttgttcagtttaagaagatttctgcgatagttacatagactgtagctatcacttaagatataaatacatgatggatgtgcagtgctgtttatgtcattattttcagtggattcacaaaatatgtagggtttggttttctctttttcagcaggagggaccaactctttttctagaactgtagattgctggggttaattttgtgatagcgtagctctagtaggggagcagtttttacatggctatttgttgtaatagtttaattgacactgttagtctgagatctttctagaatgtagagagatcagtagcactttattttaatattcacattagttttgaaaggcatttgaagaagactttttttattccctgtaacagggattggggggtatgccttgatatttgcttaaacaacaaacaattctgctgcgtccattaggaaattagttaagttcagtgaccaactacaatgacaataggtttattatcttttactcttagagaatagtttatcttttataaagtatttattattattatttagtattcagagcttcttgtttttgttttgttatactttgtatgtgataaggatgaatgatatttactccctggcctggagtaggcaccagtgatacttacagcagctttgtacagtgaaaagaacataaatgtttttcattaggcaaacttggtttcaaattccagctctgttgtttcctatctaatattttgggcaataggccttaccgctctggagctcagttttttcatttataagtggcgataatgaaaggggaaaataaaatgaaaaagttattgagaccattagctataatgtatgtaaagctccgtttggtgcattagcacacactgggtgctcaataaattgcatgtgcttgcctgtctagaatatactaaaaaagagagattaagaaaaactctgtgtcacatatttcttgcaatgtaaaaacataatatttcttagaagaaaaacatgacttttctattctttaagaatttacagtccaaattaatgttgctcaaactttgtcatttttgagacagagtctcgctctgtcgccaggctggagtacagtgatacgatctcagctcactgcaacctccgcctcccaagttcaagcaattctcctgcctcagcctcccgagtagctggactacaggcgcatgccaccatgcccagctaatttttgtattttgagtagagatggggtttcaccatgttggccaggatggtctcgatctcttgacctcgtgatcctccctcctcggcctcccacagtgctgggattttgtcatttctgtgtacattcatatctgctattatatgttgaatgttttaacttaatgtattttttattaatctttaaaatttatttrtcaattattcttaattgacaaatattaattgtatctatttcttgggtataatgtgatttttaaaatgtgtacatcatagaaagatttagtaaagctaattaacatatctatattacctcaccaatttatctttttgtgatgagaatgtcaaaaatctattttagaaattgtaaaacatataatacgttattaattactggggtctccatgcagtgcaatagatcactaaaacttattcctccaatctaactgaaattttgtactgtttgatcgacatcttccatttctctctccctcctcctctacagcctctggtaacccacctttctactctctgtttctgagatcgacttttctagattccccataaagtgagatcatttattaaagacaatatttgtctttctgtgcctgacttatctcacttagcataatgtcctgtagttccattccatgatgttgtgaatgacagaatttctttcttttataaggctgtgtaatctttctttttttttttttttttttttttttgaggtggagtctcgctttgtagcccaggctggagtgcagtggtgtgatctcggctcactgcaagctccgcctcccaggttcatgccattctcctgcctcagcctcctgagtagctgggactacaggcgcccgctaccacgccccactaattttttgtatttttaagtagagatggggttttactatgttagccaggatggtctcgatctcctgaccttgtgatckgcccgcctcggcctcccaaagtgctgggattacagatctgagccactgcgcccggcctgtataatctatatatatatatatatatatataatatatatatatatatatatatatatatatcacattttctttatgcacacttgatgaacacttagattgcttccatatcttggctgttgtaaataaagctgaaatgaatatgggagtgcaaatatctttttgatgtaccaatttcagttcctttgggtgtatacctagaagtaggattgttggattttatggtagttctatttttagatttttgaggaaccttcatactattttcaataatggtggttctaatttacattcccaccaacagtgtagaagggctcccttttctccacatccttgccaacacttgttatcattcatctgtttgaacatagccattgtacatggtggagagcaacacatactggggtctgttggcgggtgggatgggtgcagggagagcatcaggaagaatggctagtggatgctgggcttagtgcctaggtgatgggatgatacgtgaagcaaacatggcacatgtttacctatgtaacaaacctgcacatcctgcacatcctgcacatgtacccctgaacttaaaagttgaagagaaaaaaaaggaaaatagtcattctaacaggcatgaggtgatagctcattgtggttttaattgcatttccctgagaattagagatattgttgagttttcgtttgtttttgagacagggtcttgctcttttgttcaggctggagtgcagtggcgtgatcatgtctcactgtaacctcaaattctcgggctcaatgatcctgcctcagcctcccaagtagccaggactacaggtgtgtgccaccatacctggctttttattttttcgtatagagagggtcttgctattttgcccaggcttgtctagaattcctggcctcaagtgatctcctgcctcagcctcccaaagcactgggattmcrggcatgagccactgtgcagggctggggaacattgtttttttttttttttttttttttttgtatctctgttggccattcatatttcttttttgaggaaagtgtgtctattcagatcctttgtctaattttaatcgatttgttttcttactatttggttgtttgaattttttatatattttgaatattagcctcttatcagatgtatggtttgcagatattttctcctgatccatgggttgtcttttcactctattatttggttgcttgtgcaggtactttttagtttaatgtagtcctatttgtctatttttgttttagttgcctgtgcttttggagtcctatccaagaaatcattgcccagaccattgttgtggagattttcccttatattttcttctagtagctttacagtttcaggtcttatgtttaagcctttatatctcttttgagttgatttttatatggagtgtgagataagagtacagtttctttcttctgcaggtggacatccagttttcccaacactatttgaagagactgtcctctctccattgtgtgttcttggaccctttgtcaaaaatcaattgactgtaaatacttggatttacttctgggctttctatcctgttccattggttgatgtttgtttttatgtcaataacatgctgttttgattacagtagctttataatatattttgaaatgagggaatatgatgcctgcagctttgttctttttgttcaagattgctttggctattaggtctttttttggttcatataaattttaagatttttttctctatttctgtgaaaaaaaaaagacattggaattttgaaaggaattgcattgaatcaatagaggaactgcattgaatctatagatggctttggatagtgtggacattttaacattactaattctttcagtgcatgaacatgggatatcttttcatttatttctgtcttcttcagttgtttaaatcaatgtcttgtagtttccagtgtatagatctttcaccttgttggttagatttgctcctaagttttttgttttttttttttttttgtgatggagtctcgctctgttgcccaggctagagtgcagtggcgcgatctcggcttactgcaagctccacctcccaggttcacgccgttctcctgcctcagcctcccaattagctgggactacaggcgcctgccaccacacctgcctttttttttttttgtatttttaagtagagayggggtttcactgtgttagccaggatggtctcgatctcctgacctcatgatctgcccgcctcggcctcccaaagtgctgggattacaggagtgagccaccacgcctggctgctcctaagtatttttttgatgctattgcaaatgggattattttcttaatttcttttttggataatttattgtcaaagtatagaaatgctaagagcaacttattgttaaatctaaatactcacccaagtgcctcatcttaagtaatggtatacatgaaatcataggtttgatgttcaagttatattttttctgtattttttctaaaattaatgaataacaaaatgagaaaacattcatcttgcaccaccttaaagcattttgcctaccatttactaacactgggcatacttttggacacactagtctaaatcagctgcaagaacaatttagagactaatttattgttttaaacaatcaacatttttccttctttaccctcagttggatttctccactagaggagaaaatggcaaattcgttcagcagaaatattccaattcataaaatattcattccttaggcagaatggtccgtggatttagagcaccctactatagacagcctgcctgaattggattcattctctgccttttaccaaacgtaaattgggccaygttgccttctgtgcttcagttttctcatctgttaaatagttgctgtggtgatttaatgaattaaaagatgggaattgtctcgactgagtcaggaatcatactagatactcagtagaactcattcatttccatatgtgaaggaataacattagtttttattttattattttggggggtgagggttagagaagggtgtctgccatcctgatttctatccttttgataaagtgacctaataatattgatactaaccaaagaggactattataatgttttatttactcttctcccccattaatcactttttttggtggtgttttatatgttttattcctttattttcatccttcaaggagtttgccctttgtttccttctgtaattttacagtatagctcatcaagcaagcctgagatttttgtcagaatatctgaaaatctctgagctttttctagcagaaatgcataatgcagtgcagaagaatagtctagccagtgtttttcataaatgaatgtacatacgttcttcctctgcataagactgaaagtaacccaggcacacaatatcttattaatatttaatattaagaaaagtatattaagaaggtaactctccattctacctctcaacatcttaccatctagtatacacacaaatatttccttgctctatcagccgagagggtctagaagctaccataccccagtagcaatgagcacacttagcaccctcattttggtttctaataccattctctggtaaaaggaaccaagactctttgaaaaaaaatagctgatttctagggactcaggaaggaaatatgtaagatgagcctggagcatcttgtagtgccaaaaagtaaggacctgctcaaacaaatggaaccctacacccgtgggaatatactgaagagttgcaagagcaaactgaaagagctcccaatggccaaagctagaacaatttgagcaagaaaataatatagtattggattatatcccaaagggtaaaataaatatccataaacccatattgatacaatttattaaataaatacctaagtgggggaaaatagacaaatctcctcctgtgcggaattcccaataacttctatagatactctactctcaaggagggagaacataaccccctacaccgtaagtgtgagctgtgcatattgacttccttctaaacagtacagtgtagaaagggaaaaaaaagaaactgtagtggagaawcctatcactacttcagccaggttatcaaggtcaacattgacagtgataagtgataacatgtaccctcgatatgatctgatgaaaatggcacttttaatctgtggtttccctactgaaaacatataaccccagtgtaatcatgaggcaaataccagacagatctcagttgagggatattctaccctcgaaacttgaccagtatttgaccagtactcctcaaaactgtcaaggttatcaaaaacaaggaaaacctgagatacctacagccaagaagagcctcaggagacatgaggactaaatattatgtggtatcctggatgggatccagaacagaaaaaaggaaattacgtgaaaactaaggaaatctgaatgaagtgtggactttgtttaataataatgtatcagtattggttcaataattgtgacaaatgtgccatactaaagtcagacattaaaaatgggaaacagtgtagagtatataggaattatctgtaatgtctacacaagttttctgtaaatctagatctgttctaaaacaaaaagttttatttaaaagatcgaagccatcttttaaggcctatctggaatgttacatcctttataaagcctttttttttaatcccatcttcttcccatcctatatctggggtgtcctatgtctcccacctcaggctttcctaattggatacctttgactttccacagaacttttatttgtaattctcttaactcttagtacaatattttgtgtctctgttttattgttctgatgaggtcttctacggtgtttttagcccaacccagtgagtgtctggtgccttagaccacttggccatcctgacaccctacacagtgagtgtcaatataacattttgtagttagtcacataaattagtacaagaatgcatgatgttggttaatgcaaatgctgttttttaccttgtattggtagatggagagtctgagcattctactttgtgcctttcaagaaaggtttttttctttttctttcagtgacaggaatcctgagcatttctcacttaatctcagttctgcttttagatactcatgtctcagaaattttatcatagtatatgctagatcaatctcatctcgtttaaattaaaagtttgtagtgcacaggcaaaaaccatagaggccatattcatggtcataaactgctctttctcatctctacctattttagcaataacattcttcttattagtttgttccaagtgaaaatgacataactgaatactttccctgctagtctgggaagaaaggatgtgtttgttggcttttgcctgtcagagagtattctgcaatgtttgcctagggcatgcttgcattcccatcagcatctctggtctgctgcactgtaatccctatagggacagcctctggcttttattactgacaagcagtgcactgtgcagccataggcaccataataggaaacaccttggcctgtcataaacaggtctggagagtagaaagtacaggcctgctggggatgtgtccatagcaaagaggcaaagatgcggctgccatattggagtaagtgcaggctaatgtctgccatctccatttcagaaaataactggctgattttgaagctgctttttgtataaacagtagtgttttggttgctttttgtttttggcttaaatatgaataaagccatcttaaagagattatacccttcaaagtattttgagaagatctataaagtattttccttttgttattttacatttaattctacctgatcattccaatccaaacccaatagagaaggaaaaacagatatttcactatagtgggaaattaggaaaaaaagaaccatgcaaaaatacaagtgattgtgtgtcttttaaaagaattacaaatcacactgaattacccaaaattacaaagaaaagtgcatttattattaaggtaacttgtgttgtctgtgcctttacatcaactccaagttttataaaaggagtacattctttgaccataaagactttatatttgttagtgtttttttcaatctttagggaaaaaatgaactgcaatattaatgataggctttgtagcaagaatttaggaagacaataaatttcaaaattggaagggttatcacagtttttaataaagagataaaattatttcatgagtgctttaaatatatataggtgtcattttattatttacaaggaaacccatttcacaaaagaggctaaagactgtaaagattgaacaaagctataatcctgttaaaaattaagataggtttaggaaaactaaagtcctaattttttttttttgaccactttggccagagctgttcataaattaggtaatcaatrtttgttgactagtcccctcccttgttaaaaactaaacacttgtcctcttgtatcttttttaaaaaaatatttcaagtaagtttcaacagtatgctgtgataaggatgaaacctattaacattatccttggtatatattttgattttctgttgttttcttaatcttatattgtcagtatggtttctaagatctaagatctccataagggtaagtgataattgggttttgataaatcataaggaatcttctactagaaatatgtctgtttatttattgtacatcaggaaamgattagtttactttatgccagaagataatgtttgggcctaaatcttaatttttctatctagtgttaatacagtagaatgcctaaaggatatatagaagaaaagacaaaaaaagaagatgaagagaatgcatcattacagactgaatcatcagtccctacagaaggggaatttgttctttcaaaagtagaatttcagcagccgggcgtggtgcctcaagcctgtaatcccagcactttgggaggcagaggagagcagatcacgcggtcaggagttagagactagctggccaacatggtgaaatcccgtctctcctaaaaatacaaaaattagccaggtgtgatggtgcatgtctgtaatctcagctactcgggaggctgagcaggagaatcacttgaacccaggaggcagaggttgcagtgagccaagatcgtgccactgcactccagcctgggtgacagagcaagactctgtctcaaaaaaaaaaaaaaaaaagtagaattcagctgggcatggtggctcacacctgtaatcccagcactttgggaggtcgatcacatgaggccagaagtttgagaccagcctggccaacatggcaaaacctggcctgtactaaaaatacaaaaattagccaggtgtggtggtgcatgtctgttatctcagctactcgggaggctgagcaggagaatcacttgaacccaggaggtagaggttgcagtgaatggagatggcgccactgcactccagtctgggcgactgagtgagactccatctcaaaaaaaaaaaaaaaaaaagtagaattcatgggaaaaattatttgttgctatttagccttatttttaaatatttcagtatattgtctgtttgatacatatgaacaatctgactacaactcattgggaaacaccagtatttaccttaccttctaatgtaaggcatgattccaggtattttctcatacctcaaaccttaaatctctaatttagtcccagaaacagtattctacatgtcaaaacgttttttgttttgttttgtttttggagacaagttctcaccttgtcaaccaggctggagtgcagtggcgccatcatggcttactgcagccttgatctccctggctcaagccatcctcccacctcagcctcctgagtggatggagccacaggcatgtgccaccagaccggcttttctgttttttaatttaatttaactttttttttttttttttgtagagacagggtctcactatgttacccaggctggtctcaaactcctgggctcaagtgatcctcctgccttggcctcccaaagtgcatgagccagtgcacccagcctcagaatatttttaaagatgaaaacctaatgctcagttaaacttttataagatctatgtgcttctaaataagtgtaaagatgactattttctggatgttgtattggtggggaagatggagagatagaagaacaagtgtttattctctggttgtattttctctctctctctcttttttttttttccttgagttagagtcttgcactgttgcctggactggagtgcaatggcgtgatctaggctcactgcaaccttctcctcccaggttcaagcaattctcctgcctcagcttcccaagcagctgggattacaggcgcctgccaccacgcctggctaattttttgtatttttagtagagacagggtttcactatgttggccaggctggtctcgaactcctgacctcgtaatctgcccaccttggcccgccaaagtgttgggattacaggcgtaagccactgtgcccgacctctggttgtattttcaaaatatatccaaataatattttaaaaatgtatttagtgagcactagattccaaaatagcaagagcaatttcagcaaagtataattcctagagaggaatcctacagtacctcgttttgccttttttgttctctaggtcatgtcaggatgggagcataactgacctggccctagttcctaggaggagcatgtgccctctaacatgtgcacagaaggataatagggtcagtgggatgaggagaccaagtgactaaagcagatstgagaatctgagctgtaaaggatttggaggtgggatggagggataaaaccttagtgggaagcagacagcagatagagaagatataggataaactcacggaaggtgtaagcaggttcatgattttaaaattagcctrttaagaggttgtgttggaggtctgttttcttagtgggggcaaagtggcaagggaagtttcacttctgaatagggtggaaaatgaagatataaggaaagaaagagagaaagaggaaagacgtattaggcagtgtgaggcagagaaagagaagagtgggagaaggaggggagtcagactttccttggctggaggcaaactgaccaatgcccgttgctgcccctttccaccgcagggttcatttggtgaaacctggttggactgaacctttaggagaaccttgaagtaaaaaagaaatcccagacaggtcagtggcggatgtaaatgtttaaggaagaacagacagtcagctgtagaaatggagggaggggtagagctgactggagagcgatttatggatggtatatttcatgaggcttgagtcttttttagcactaatagttggcgtcagcttcacctgttgcctccatgagtcatgccctggtagcagaggatggtgggccaactgccaagccatcccctgaaggaccggctgcctgggagtgaggaaaggtggttgatgggctctgagacagcaaggtacaaactgaaatggggtgaaaagagactgtcaaaataagtatgggctgatttgttctaatatatcataggttattattagatgctggaagagtaaaatggaatagaagatgaaaaatgtgaacctttatcttgattccattttaaatctcctaaattctgaggagctttgcaattcctcttctggatataaatctgccctacagtagagttgcaaccttggataaataaataaatttggcctccctgagcctctgttttccctgtaaatcaggactaacataatctacctcaaaggattgtgttgaaaattaagtgaaaacttacataaattatgtagtgtggtggggacatatgataggtactgtggcctatccttaggagggatgaggaatggaactatttttaaacataaaaggtcaactttatatgctgccatataagtaacccagtgcaattggagcttgaatcaacagggctgggagaaagcttacagagtgtgcctttgaaatcccaatacccagtcatggtgatttatgagaccttaccagcttgcatatgtgatggcccactgagtttgtttactttagttttagctcagttacccagcactctatgatagcctattttttatttacactctcactaactcctttattatgatttctttgaaagaatatgaagacagccataaaaaagactcttattgaagttgagagggtctcctgtaggtcttcacttcactgtgtctaaacattggtctgttgcttgtgctttgcttttctctcaccctggatgaccttcaaggctcttccaaatgatttctctgattccctgaaatactgaaattgtgattaacagaagtttcaagtgttaatcaatatcaagatagtagttgtctcttcctggggaaactagaaatgaaaaccaaacataggcctctgtaatcattgcacagattaaaaatgaaaatgcagctgagaaacagaggaatgaatgagaaaaccctaaacctagttctagccccaggatgaggtctttgtcatgagtctgacgctagccacagccggtaagagaaggaattccctagtagtgtagttgttacaagggaatgagtcattttgcaggtaattgttcttcttccattttccacttgctgtcagccactttacagaggagtcggactttgttctgcttaagagaagtctctttccttttattgtttaaaaaaaaaaaaaaattccagaagcccttagaaagagatttgtgagatcaactggtttaccttcttcattcagatgaagtaacaaagcacagaaaagttattttgtcaaggtttctgtcttgtagcaaatacaaactttctggtgttaaacatatgaccctgatttgggtctttactgacatcatcacttttttttttttaattttctgagacggagtcttgctctgttgcccaagctggagtgcagtagcacaatctcggctcactgccacctccacctcctggattcaagtgattctcctgcctcagcctcctgagtagtgggtataacaggtgcatgaccacgcccagctgttttttgtgtttttagtagagatggggtttcaccatgttggccaggctggtctcaaactcctggcctcaagtgatctgcccacctcagctttccaaagtgctgggattacaggtgtgagtcaccacacccggccaacatcatcacttttgaatgaaatttttagtttggtgatgactttattatttgtatttgatccttgtccatttttctctagatctggtactaatttcatgtggaaaataaatcgttaggaggttttcattttgtacgttttggctgcaaacaaccacaacccagtctttaggttttcactgagggatttttgttttagcccaattattgtatgacatgtatctgctccagaggttcttataggtgaaatgagatttttatgtatctgtattcaaacacatagatagatagatagatagatagatagatagatagatagcgaaacatatagacatacctctgaaaatacaaccagccatataatgtaagcctgttgtgtgttaatgaatgatagggtaataatacattatgttcctgtcctgtagaggagttcgagtattcaatacagaggaccagaatgattggtcccagaaaaagtgctccttaagctggatcttgaatactgaggatttatataggcatctaatagggaagaggtggtattccaggggctggataaggcagggtaggatggggtattcatgtggattcgctttattgtatgtttgctggagaggagggtagtgggcattctggaggagtgagcctctctggaacagaggatgtgattataggaccagtggcaggtgtgagaaatgtagattgaggccatactgcagactgtcttaaatgccaggtcaagccatttgcacattgtcctataattcatgaagaacccttacatttgactataaggaaaatattatgaagaaactaaaataaggtgactttagaaggttatatctggtggtagtgtgcaggatagattatatcaaggggaaattgtactgaaagcaagaagaaaccgttaggraattaggtgtaagagtgataagggcctgaaataggatagtgatgaaaagagaggaatgagtaggagaaagattgcacagagaagggtgacagcatacataagacttggcaggaccacagccagaagaaagcatgaaattctaaacctgaataatggacagaattatagttggaaaatcatgaagagaagccagttgggtattgggggagggctggacaatatgacagttaagtttttagacatataatttaggtaaggctatgtatctaagcggaaatgccctataagctttcagttgtcaggactggatttctggttaaaaaaaaaaaaaaaaagagggggcaggattttacttgggtgttgtctgcaaagttgatagctaagaccttaaggctcatctgtgaaacgggagtgacagtgctcattaaaggttattattagaaataaatgaagtaattccaggagagtacataggactctccttgacacatagtagaccctcaataaacattaggttttattattgtttattatgggttttagggaacaacacttttgtgaattattagaaccttatttgggaagctataaaagccatctgcgtgatgtgttttcttagtacaccaaatggaagttcatatgttccattcatatacatgcttccctagctgttaggggaaggtgatagcgcatgtttaactgttgatcactgtttgtaaggcttttcgtgttttttacatatttggttaaggatcttaatccttgagctgtattttgttctcatttgtttgtgtccagagtcaaattaagtttaaggaatttataaagagcttctttgcaagaatgatattaactcaatgtactaaagctacattcacccaaagtgtaatagacttacacaacatggaagaaatccaggagaggcagacagttattcatgaagagtggtagtattcctgtctgcctgtctgtacatttgtcagatcagtgcattctgagaaaattatgccaatttgaaatctccaaaagcattctcagccagtatccgtgattctgatagtttacaaactgttgatagcataagctgttaggaagatattgtagaaattttaatgcagctgttttaattagattgctttccttataacaagtttcagtgtttctggtcacaatacaatttattagctcctgacacatgacactgctggatcaccaaccttaactctgattctctccatacaacccagtatccttaagtaaaatgctgcatatttcattgctggtaagagaggcagggccaagattcgaactcacatgaagccaactagagaagcctatgctctacactattttacatctcataattctcatacactactaacctgttgcaaatgaaaaagaagtcttattattgtaccacttttaattgcacttattattgccttcagtaaagtcttcatttctaaaatgtcttagtaaaacagtaatttcataaaaatattgccaactaggagtactaaattctaattttggttatattatgcggccttggataaggaagtttcttaggctttcatattccaaattattggactattctaaaaacatttttaagtattttgatggatgtagtctattctaatataatgtctttcaagtgtttgaaagttactacttattcaaaactcaactgtctggcagcttttcttatcctgaactctgtgaagaacttcggggacaggaggtaaaatgtctttgaagagtaagaaatccaaaacttcatgtatttacatgttctggtcttgtctcataggattcttctttctccttacataccctcctttaaatccgtacctcccccggtcttctccatcttgcaaatggcaccaatgtccatcctagacattgatcatcccagaagtctaggagttgattcttctcatttcttcagttctgttgtgcaagtcttcaagtcttgtcagttttgcctcaagcacttttacaaactatcctctacagagacagctttacaaaatgtaaatcacatcctatcattccctgctcagaaccttctaatggtatcctcacaccctctggaaggctcataccctcaggacccacgtgatgttgccttgacttgcctcggctctcattccgtagacctgtcctccctcagactggctgtgttactcagcctttgttgagagtgctgtgccccaaatctggttggcttattctaggcattcgagtctcttcccaaataccaccttctcaagtgcagcttttccttactacttaattttatagtcccccatcaatgtacgatgttaccctcttttccttcattgagagtgtttgtaatttttttttgtctgcttrtttattgtctttttgccccataagtccaaggtttacatgaacagggaacttgtctgttttgtttattactgtatcccctatgctggcacatactatgtaataagtgtttgttgagtgcatgagtgaataaccattctaaaaaactctgatgtttaaagccctttgctttatataagaattttacttggaaccctggtattttygtttgtatttgtttgttaataaatgtcaagagttcagtagtaagataggtttcagaaatgctaagttaaacagaataaagaaagaatatgtattacaggtcctggcagagccttgaatatgctaacatttgacagtgggagtctttgagaattatcacatgaagctgctgtacattacaacacattctaggaaatgctgtcttagacaaaaacctgtcatattagaattggggtaaggggcacgatactgaccgtgaggcagcagattcctatggactacattaaaaaaaaaaaaaaaaaaaaagaacagactgataatctagggctcagaaaaaaaaaaaaactgtgatatgaaacagtggcaaaaggattcaaaaagaatacagcggttgggactatctacttttttaatttttttattacactttaagttctagggtacatgtgcacaatgtgcaggtttgttacatatgtatacatgtgccatgttggtgtgctgcacccattaactcgtcatttacattaggtatatctcctaatgctatccctcccactcccctcaccccacaacaggccccagtgtgtgatgttcccccatcctgtgtccaagtgttctcattgttcaattcccacctatgagtgagaacatgcggtgtttggttttctgtccttgcaacagtttgctcagaatgatggcttccagtttcatccatgtccctacaaaggacatgatgaactcatccttttttatggctgcatagtattccatggtgtgtatgtgccacattttcttaatccagtctatcattggtggacatttgggttggttccaagtctttgctatcctgaatagtgctgcagtaaacatacatgtgaatgtgtctttatagcagcatgatttataatcctttggatatatatccagtaatgggatggctgggtcaaatggtatttctagttctagacctttgaggaattgccacactgtcttccacaatggttgaactactttacagtcccaccaacagtgtaaaagtgttcctatttcttcacatcctctccagcacctgttgtttcctgactttttaatgattgccattctaactggtgtgagatggtatctcattgtggttttgatttgcatttctctgatggccagtcatgatgagcattttttcacgtgtctgttggctgcataaatgtcttcttttgagaagtgtctgttcatatacttcacccactttttgatggggttgtttgattttttcttgtaaatttgtttaagttctttgtagattctggatattagccctttgtcagatggatagatagcaaaaattttctcccattctgtaggttgcctgttcactctgatggtagtttcttttgctgtgcagaagctctttagtttaattagatcccatttgtcaattttggctcttgttgccattgcttttggtgtttcagacatgaagtccttgcccatgcctatgtcctgaatggtattgcttaggttttcttctagggtttttatggttttaggactaacatgtaagtctttaatccgtcttgaattaatttttgtataaagtgtaaggaagggatccagtttcagctttctacatatggctagccagttttcccagcaccatttattaaatagggaatcctttccccatttcttgtttttgtcaggtttgtcaaagatcagatggttgtagacatgtggtattatttctgagggctctattctgttccattggcctatatctctgttcttgtaccagtaccatgctattttggttactgtagccttgtagtatagtttgaagtcaggtagcatgatgcctccagctttgttctttttgcttaggattgtcttggcaatgcgggctcttttttggttccatatgaactttaaagtagtttttccaattctgtgaagaaagtcattggtagattgatggggatggcattgaatctataaattaccttgggcagtatggccattttcatgatattgattcttcctatctataagctttgtgtcctcttttattttgttgagcagtggtttgtaattctccctgaaaaggtccttcacatcccttgtaagttggattccttggtattttattctctttgaagtaattgtgaatgggtgttcactcatgatttggctgtttgtctgttattggtgtataggaatgcttgtgatttttgcacattggttttgtatcttgagactttgctgaagttgtttatcagcttaaggagattttgggctgagatgatggggttttctaaatatataatcatgtcatctgcaaacagggacaatttgacttcctcttttcctaattgaataccctttgtttctttctcctgcctgattgccctggccagaactttcaacactatgttgaataggagcggtgagagaaggcatccctgtcttgtgccagtgttcaaagggaatgcttccagtttttgcccattcagtatgatattgrctgtgggtttgtcataaatagctcttactattttgagatacatcccatcaataccgaatttattgagagtttttagcatgaagtcctgttgaattttgtcaaaggccttttctgcatctattgagataatcatgtggtttttgtctttggttctgtttatatgatggattacgtttattgatttgcatatgttgaagcagccttgcatcccagggatgaagcccacttgattagggtggacaagctttttgatgtgctgctggatttggtttgccagtattttattaaggatttttgcatcgatgttcatcatggatgttggtctaaaattctcttttttttgttgtgtctccgccaggcattggtatcaggatgatgctggcctcatcaaatgagttagggaggattccctctttttctattgattggaatagtttcagaaggaatgttaccaactcctctttgtacctctggtagaattcagctgtgaatctgtctggtcctggactttttttggttggtaggctcttaattattgccttaatttcagaacctgttattggtctattcagggattcaacttcttcctgatttagtcttgggagggtgcatgtgtccaggaatttatccatttcttctagattttctagtttatttgtgtagaggtgttattctctgatggtagtttgtatctctgggggattggtggtggtatcccctttatcattttttattgcatctatttgattcttctctcatttcttctttattagtcttgctagtggtctatcaattttgttgatcttttcaaaaaaccagctcctggactcattgatttttttgaaggtttttttgtgtctctatctccttcagttctgctctgatcttagttatttcttgccttctgctagcttttgaatgtatttgctcttgcttttctagttcgtttaattgtgatgttagggtgtcaattttagatctttcctgctttctcttgtgggcacttagtgctataaatttccctctacacactgctttagaatgtgtcacagagattctagtatgttgtgtctttgttctcakyggtttcaaagaacatctttatttctgccttcatcgcattatgtacccagtagtsattcaggagcaggttgttcagtttccatgtagttgagtggttttgaatgagtttcttaatcccaacttctactttgcactgtggtctgagagaaaatttgttataatttctgttctattacatttgctgaggagtgctttacttccaactatgtggtcagttttggaataactgtgatgtggtgctgagaagaatgtatgttctgttgatttggggtggagagttctgtagatgtctattaggtccgcttgttgcagagctgagttcaattcctggatatccttgttaattttctgtctcgttgatctgtctaatgttgacagtggggtgttaaagtctcccattattattgtgtagaagtctaagtctcttagtaggtctctaaggacttgctttatgaatctgggtgctcctgtattgggtgcatatatatttaggatagttagctcttcttgttgaattgatccctttaccattttgtaatggccttctttgtctcttctgatctttgttggtttaaagtctgttttatcagagactaggattgcaacccctgcttttttttgttttctatttgcttggtagatcttcctccatccctttattttgagcctatgtgtctctctgcatgtgagatgggtctcctgaatacagcgcactgatgggtcttgactctttatccaatttgctagtctgtgttttttaattggaacatttagcccatttacatataaggttaatattgttatgtgggaatttgatcctgtctttatgatgttagctggttattttgcccattagttgatgcagtttcttcctagccttgatggtctttacaatttggcatgtttttgcagtagctggtactggttgttcctttccatgtttagtgcttccttcaggagctcttgtaaggcaggcctggtggtgacaaaatctcagcatttgcttgtctgtaaaggattttatttctccttcacctgtgaagcttagtttggctgggtatgaaattctgagttgaaaattctttyctttaagaatgttgaatattggcccccactctcttctggcttatagagtttctgctgagagatcagctgtaagtctgatgggcttccctttgtgggtaacccgacctttctctctggctgcccttaacattttttccttcatttcaactttggtgaatctgacaattatgtgtcttggagttgctcttcttgaggagtatcttcgtggcattctctgtatttctggaatttgaatgttggcctgccttgctaggttggggaatttctcctggataatatcctgcagagtgttttccaacttggttccattctcccatcactttcaggtacaccaatcagatgtagatttggtcttttcacatagtcccatatttcttggaggctttgttcatttatttttactcttttttctctaaacttctcttcttgcttcatttcattcatttcattcatttcatcttcaatcactgataccctttcttccagttgatggaattggctactgaaacttgtgaatgcatcatgtagttctcatgccatggttttcagctccatcaggtcatttaaggtcttctctatgctggttattctagttagccatttgtctaatcttttttcaaggtttttagcttctttgcgatgggtttgaacatcctcctttagctcggaaaagtttattacccatcgtctgaagccttcttctctcagcttgtcaaagtcattctctgtccagctttgttccgttgctggtgaggagctgcattcctttggaggagaagaggagctctgatttttagaactttcagcttttctgctctggtttctccccatctttgtggttttatctacctttggtctttgatgatggtgacgtacatatggggttttggtgtggatgccctttctgtttgttagttttccttctaacagtcaggaccctcagctgtgggtctgttcgagtttgctggaggtccactccagaccctgtttgcctgggtatcaccagcagaggctgccgaaccgcaaatattgcagaacggcaaatgtagctacctgatccttcctctggaagcttcatctcagaggggcatctggctgtatgaggtgtcagttggcccctactgggaggtgcctcccagttaggctactcgggggtcagggacccgcttgaggaagcagtgtgtccattctcagatctcaaacttcatgctgggagatccactactcttttcaaagctcagttggaaatgcagaaatcacccgtcttctgcatcactcatgctgggagcagtagactggagctgttcctatttggccatcttggaacctcccccagctatacctactttattggatttttgtgtctccatcagctgacatggtacttacagcctagaatgagcatacaaaggatactcattcgctattcgatgatgactgacaaacagtctcccaggatcaccatgaaataactaaactgagtttgatttatttaaaaatcaggtccaggtaacaaactgcacctgtccccttgaattgatacaaataaaaataaaacaaaaaaggacaatattttactttatggaactttttattacaaagaattaaaaaaaaataaaataataatacttaaaagaatactttgactattattttatcacctaaaggcttctcttattattttatttttggagacagaatctctgtcaccccggctggagtgcagtggcgcgatctcagctcactgcaacttctgcctcccgggctcaagcaattctcctgcctcagcctcccgagtagctgggattacatgagtgcaccaccacaccctgctaattttttgtatttttagtagagacagggtttcaccatattgccgaggctgatctcaaactcctgagctcaggcaatctgcctgcctcggcctcctaaagtgctaggattacaggcatgagccacagcgccctgccaacctaaaggcttttcacaactgggaattcactgaatgttgtatcattaaagctaatgtggaccttggataactgtatgcctrttttctgggaaataatggtggagctctttgaaagggtaaaaatggtgttttatcatacataactatgcctgaggtttttgttttgcatttatctttgggcaaagttgtaaagttaagcaaatctggaattgaaataatttgataacatcagctaatatttttcaaagttagatttttgaggtataatttacataagagttactctttctagaggtatagttgaatgcattttcacaaatgtgtacaattggataaccaccaccataatctagatatataggtaatgtgtaattataatatatatgtactatataatataggatatttataccacccaaaaagttttctcttgctttttatagtcattccccaaaccccacgtccagtgctgattgtccctatggttttgccttgccagaatgaataatacattaaagatatagccttttgtgaatggcttctttcacttacaatacttttgagttttgagttgaattataagtttcacttataatacattttgtgttattgcatctattggtaatttgtttcattttattgctttttagtatttcatttttttccagtatgtcattttatggacacaatttgtttacccattcaccagttgactgatatctgaactgtttctgggtttctgctatagagagttgctataaacattttcatataggtctttatatagacatatgttttcatttctcatgggtagatacttagaagtaggattgctgggtcatatggtcactctactttttaactttataagaaactgtcaaacctttttccaaagtttctataccattttgcattctcactagcaatgtatgagaatttaatttgctctgcatccaggccagcattttgtattgtttgtattttgtattttatacattctagtaagtatgtagtgtggcatctcactgtggttttactttttgtttccctaatgtctaatgatggtcrtggatcttttcacatgcttattgatctttttgattcttatgaagtgtttgtttgttcaaatcttttgaccatcttttcactggattgtcctcttattgtgttgtaaagattttttaaaaaataatttctggatacaagtcctttatttgatatgcattttgtacatattcccttctcaagtctgtggcttgttgttctgttttcttaacagtttttttcaaagagaaatttggtaaagtccagtataccatttttcattttatgcttcatgcttttgtggtttaagaaatctttgcctaacgcaagatcacaactactttctactgtgttttcttctagaagttctttagttttagattttacatttagttctatgattcatttcaagtagatgttagtgtggtgcaggataaaggttgaagtttcttgttttatgagtggatgctcaattgttcaagcattctttgttgaaaagaatatcatttctcttttatagctcaaattttattacttaaaattattttaagatgcacatattaaagtgatatgtgtaaaagattatatatttctggaagcatgcctatttacactagttattattactttaggagacagatattctctttgtttaaattgtttccacaaagcataccacgaagtacagaggggacattagtaactattttatgatgattatggtattcatttaggccaatttaagtgaattggagatcctaattttctctataaggagacaatactttttcatacaagattatttttgtggaggcttcatttatgtgaagtttttgcacccatttattgtcatgattattcttcagtgaaacaaaagtctgtagtagatatgctgctgctgctggttttaggtaaattgactaaatagttatacaaaactctgtctctaccatatatgaattcaaactgtatcaacaattacagaatactatgctaacatctaataagagagttagcccatgtagaagagaaatataaatacagctatcagatcagtctcatgttatttcagcttcaaggagcctcttagcaaaaatggtttcctttctccatacatgttgcaggtgtttactattttaaatgagacttttttgttaaaaaaaaattaaaataagatcatttagagaacgattctcagcttgttcagatgattatttggttttaaaaaagcagcctggagttcctcttaatctcaaatctccataaaacttacaagagatgttttcatttactgaaaggaatagttttttcttaatcaaatgtagagccattatcactagagggcagtaaatacaaacagatttagtggatttactggcactaacgatgttttcagaatactagcattaatcaaagaaagtatagtttttataatatgaaaatacatgtaacattctgttatgtaaaatattggttatgaatcaattctagattattgtctgcctctaaaatatttttaaggcatttgaaagcaaagggaggctgagaaacactagttttctgtggctattctgtttaatacttgaagtttaactttgcctcagaattcttcaagggacatttaaaaattagatttgcatttgttcaagctgaacagtactggatatatgagagaccacgttatatagatttgcttcttgattaataactaccacgacttttaattttaaggtgaaaggtgtaaaataaatgtagattgattataggataaaatattttccaataatgtaagtcctactgcaaacagtgctactgcctggaaaactccttatgttggagaggtccaagagctaatacacttattttaaacaatatttcttaaatatttcaaacacagtaatataatatacagcttagaattgattatattaacggatctattatgtaggctctaggctaaatataaaataatgcctgaaatagttttctttttttggcaatttagagtactctgaaaccagacagtctgggttcaaatcctggccctgttacttactactggctttgtgaccttgagcaagacaacttgacctctctgagccttagtttccccataatttagttttgtttttccctattcaaaaatgcatcttttctctcttgacctctgttacaaagtcaataatgacagcatgtgttaatgtatcagcagttcagctccatcagcagaatttcaaatatcctgaaatgtactgaaatagttcaaaaagattgttaattgcttgggtatctggtaaggactgagaaaacaaggaatagcagggaagtggcctctagaaattctgaggggtatttctaggaaaagtctgaaaaagagaactaactgaacattatgggaattttttttttcttttttgagacaaggtcttgctctgtcatccaggctggagtacagtggtgcaatcatagctcactgcagccttaaactcctggcctcaagccatcctcccacctcagcacctcccacctcccacctcagtagtatctggaactacaagcacatgccaccacacctggctaatttttaaattttttgtagagacggtggtttctctatgttgcccaggctggtctcgacctcctggcctcaagcaatcctcccgcattggcctcccaaaatgttgggattacaggcatgaggcacttcaccaggccaagaaactattttttctatttcaacaaacacacttgcatatatgtatataaaatcatttgggcatttgagagcagtggattacagataagaaacctgagctctagctgtaacgctgtccctcaagttgtgttgtcagaacttttctggacctcagttccttgtctgaatgtgtcgtcatcattacatctgcatatgagggcagctgtgtgttgttcacatagcgctcccaaacataagcgtgtctcactatatggcagggctgtctgcctgtgggcacctgcttcctcaccctgtccagagatctgaccatggtgatagtaaccatgattctttaattcaaggcactgtaaagttagcaaaaagattgaggataaacaaatccactcctagattcatactgtttatcatagagtttgcatcagcctaattatatgatgagctgtcatacaccattaagagcaaggactgggtttgcatttcaatcctgtcacctatggagcaagttattgaatatgtaagaaggtccatcttttcatgttaaaatagggataatatttatcttatcagaatgttgccaagattagaaatgaggtatgtaaagttctttgtgcatagtaggtgcctagtaaatgttgtaacttattaaagtttcttcattaaatttggtgaagccaagtctgactataagaattgtatctctctggctctattcaaatttctcttctaaattatctagattctctctgcagatagcagctaccgtggcaataggaaggagattctagtctcctagaaatggagattagggaaaatgaaatgaattttaatttggctcagagatttttgaaaagatttcttattccctagaaatatggaaactttccttggtactttttactcaatatgattaaataatctcccttattgcagcaaattagggacttatttgaataagttaaatcctttcacatccagcacctattagaatgcctggcacataatagttgccaaatagaagtctgttgaatgaagggaccatcactcacattcagcagggagaagaggctgcagattttagagggaagggaaactgtatgtgtgtttctgcataatgttttaagacaaggagtattatctactatatgtaatctgttttaaatgtttttgatgattttgctgagggtgaaaacccttgtcctttcctgtcacctataatcagtataaaaatattgatgttttgcatctgcatcagccaacaatctttttgtggcaatagtacactaccttgagaaatacagggacataataagatacttttctggcctcaaagatcctccaccctggatgaggagtcaaagttgaagacagttgaaaaaaatagaacagtgattcttaacactggggaacattcaggaaatttcaggggacagtgactggggagtactcctggtgcttggtgggcagaggccagggaggctagatgtcctgggatacatgggacagcctttcaccagggaggtttgctgtgtgtcccacacaacttccaaaaagtcccagcagctattcacataggtgaaaaaacaaaatgcatttataattctctgagcctagaacccaactactttttacgtataagtattaaatatttttacatggttttaatccacaccaaattttctagtaatgcagcaatagtgtatattgtgaagatggcactttgttacatttgaaacctttcaaagaatcattcatcatatcaggaaaaaggaaaatttttctaacataacacccctgtattcattttcatgctactgttacttttgtggtaattctccccataagagaaatcatagcaaacccttagatagcacttactgttctaagagccttatgtatatgcactaatttaatcctcacaacaaccctgtaaggtagaaactattattctcattttccatgtgagtaaactgaagtatgggaaatttaaatagcttccccaaggtcacacagctaatcagttatagtagtttttgactactttttaaaatgtagttgtgtacaagtatttatattttgtagtatttgatagaaattactcatttctcctttatttcactgataagccattatactgattttttttttaaatctatgtagggagtatttagcctatatgtattcagtacagtattatgaaggaagtgtatttaggaatttcatttcaggatgaatacttgttataaaaagtaaaaagtaactgagtcttaagtttgtcaaagaataaaattgatggatggatggatttttttttttttaaaggagggggaaggcagtgagcctgactgcagagtgtaatttgcatttaaatgacaagtggtatgacacttccacctgttcttcagggagcctcaccaagtatgttttgcctcgaggcctttgcttttgccattcctcacttggttttcccttctctaccctacctctcaccccgcaatccacatggcttgtttcctttcttcagatctcctggtatacgtcatctcatcagaggggctttccatgatcaccttatagcaacctctatccgtaatccttatcccttctttctctccattgtgcttatcaccccatgacgtattatgtatttattaacttagttttggaatataagctgcaggtgagaaagctttgtttctctttctcaggcagtgcctgacatagagtaggagcttaataaatattgaatgaaggggcagatgtagaatcgttagaatttggaaaaaggctggaatatttggtcctaagatgtactttgaatgatttaaatctgactgagaaaaccagtttgaggttggcagagtagaagaaggagggtattttaggccgagaatttggtaagacagagatgggattgtcagctgtatggtgaaggtggaggartactagtctttcaggaacagagcaaatgtaatagagcagctgaaaataggcttggcgttggggattaaggtcagatatggcagtctggaatttacagagggatgtgatgaagcaggcattactagctttgaagtaacaggctgcggctggatttgaggaaaattgatctggcagtagaggtcaatatgagactagaaggggaaaagccaggggcaagaagatgagctaagaagcaattacagcattttggccctgagacatggagtgctgtgatgcaattgaaaggaaatataacatatatattttaaaaacaaatgacaaaccagagaatttttttaaatattagtataatagaatgattatcataatgatcattgtcactgtcatctttactgtctgatacctacttatcttcaactttgtaccatttgttgttttaagtgctttgcatatatggtctcatttaatcctcatatgtatctgttctggttatttattgctatgtaagaaatcacttcaaacctaatactttgaaatatgaatgtatttttattagttttcatggctttgtgggttaactggtcttggctagacattcttgcttggcattcctcatatggttgcagcccagtgggtagctatctgaaagctgaactggctggatggctaggatggcttcttgcccctcaggtctggctctgggctggggtggctggcattgctgaagactggccaggcatgtgtgctctttcttgtgcaagtgctctcttgcgctttctctcttcactgtctgtgaagttaacatggacttcttgtagcatagcctctcagagtagtcagacctttttttttttcaacctaatggcttaggggtcccaatagcacattcaaagaaagcaggatgagagctgcaagatttcttatgacttagcctcagcagtcatgcaccatcacttgttggttacacaagccaactcagattcagtgtaggacagtgtggctcattaagagtatctttggagactagctgccacagtaatccactttacagatgaggaagctgacacactaaaaagattatttgtcagtgattgtgcacaaaagatttaaacttgcaattcttgttctcagtaccagagtgaacctgggaaaatcattttttctctctaggtctcaactttatgtggaaatgagggagttagagggggtgatattaaagttactttctatttctctcagtcttttaaatatttggattcagattacgggaggggtaatggtaaggaayaaactgaaagaaacagctctggataaaagatagggcttgctaacaaagttgaatgaaggagggaaggtgatgccgtataggggaacatgccgggttactcaaggattcagctagatggtttatattaaacacctgacagtgtctgacgcacatgaaacacctgttgaatggtaggaaagagtcatagattccatctgagatactggaagaaatataggctcactgactgaaatggaagtaattatactaagaactactttaaatagaaaaatgtctcacagttttgaaaaagtttgtcgtgactagcagggcattcgagaggagaatcttgtattcagaaatatggcactgaagttcaagttagaagtggtcattgaagattgtgggcctagggaaaattaaagaagttcaggatcctgggagttgagggagagtagtaggaatgatcaaacatgtggaacacttcagagaagtagggagaccagagaaaaggaggaccttagtattcctctgggggtagctttagtggaatgttggagctttaatttcttccttttgtagaggagtaagagtgatggaaatgaatacaacagatgttaacaaaagcagaggactgtagcagctaaaggccaatagaaactcagagagacacagtgttacaggagtgcttatcagagagcatgctctctaagacagacatgccacatgtggaaatagttaaatgtcaggaagactgcagagtagccataccagcaagttaaagcacagagtagtaagcacaggctttgagatggagaggaggtaaaatgcacagaattatatgctaaaatcaactaaaacctagtttttccttgtttctcacccacaagacctctttagtattaaagttacagggtaatactacaccaaaccaaatagaaaatgctgtttttctagaaagaactttgatttctcatttaaccctcctcgtaaaatgtctgattactcttgagctcaattctggattcctaagagccactcattcctttcttaactttgtgtacagttattaaaatgttctgttctggctgggcacgttggctcacacctgtaatcccagcactttgggaggctgaggtgggcagatcccctgaggtcaggagtttgagaccagcctggccaacatggtgaaatcccgtctctgctaaaaatacaaaaattagccaggcgtggtggtgggcgcctgtaatcccagcttctcgggaggctgaggcaggagaatcgcttgaacccgggaggcagaggtgacagtgagccaagatcgcactactgcactctagcctgggcgacassgagactctgtctctaaataaataaataaaatattctcttctgatcaaaatacagatcctgagttctatatacaaaacactgcattccttatgcatacacagtgccctagctttcacatttccctccccccagaattgcaagtggtcccacccctagattttgaaggttttagaactctgtcatacataacaatagaaacaaaaggagctgagagcagccatgscacacaggtgagggaatgtgtcattgccatctgtgccatctgtgaattctggacattagtcgtattgtttaatccctatgcttttatgttggatgaggggagaactacagtcatttctacatcaccagggagccacttgttttggatttgagagagggaagcaattaaaatgctcgattgccatttttggagcagtttttatttggaaggaagggaagccagaggacattaaaattcatagaaaatgccctccaaaaggatgggcaattcttaagaatgaactacgaattttgaggagttttatggtcattattcatcactgcaagagggaagccccgttcatcttttctcagggtggcctcagagctgcagggataccattattcaatggcgtttgtcgggtgaggagaaagcctccccagaggctggcccttgccaaccaatcccaaagcagcctgcaccgaggccacaccccctcgccttataggctaagagctggaatgcaattggtgcagagttggggttttatgggaggggcttcttgtcactcttcccggcttccctgcagttccttatttggtagcttttgacaggactagcctttcttgcaactaagcatcttgacatacattattcattaagccctggagctcgggagagaaagatgcagacccttagatctttagatattcctttatcacgtggattttctttattcagaatagttgctgaattttgtgccattctggagtcttacaaatggcatgtattcgatgggaagacggctggatgggatttaatgcgaggctttcttatgtatacttaattaccaaaaatctttaaaaactcatactctgcgtggcttgtggaggttgttaaagtgtcgagattttgaagctaaatacattttagagctkwctatatatatacatatatatatatatatacatataatcaatcaaaaatgcctgaagcaaactatttactgtcagtgtcttggggctacataaaggtaagacttacttagcttttgaaaactccttactctgattacaaaattatttagaaagcttagactctactgtaatttgttcaaactatcagttatgtattctttccttacacatgaactaggaagaaatacgtgttaatagtggtcaagataagattgtataactttcatcagttgtagtttgagtgttaaaatagctkttttagatacgcagtagttcttctgtttgtcatgtggtatatgtttgaattgtgcttgaaaaatatatggtaattaaatacattcattgcaaataaattattgggccaaattacttatactgatttatggattccagttagtatgttgcacataaagtttataaaattaatttgtggctgtttctaaaaatctatactactttaacctgacgaggaatacgtttttttcacctttagctataaagccctaggtgacattaaaaattgacattacttaactatgtaagtgatactaaagtgaaaacttgattgtctattatacttgcaaaactgaacaaagtttttattacactgttttgtgaatctcaagaaatgaattaataaacaattcaataagattgtgtccatgcttggcaggctttttccatgccctgtggtaacattagcattgtgatcctgtctccacaatagaaggaggtagaaaaaccttattcagtcctaaatgaaacatcacttcacagatttttggtatttgagccactcgcttgaacctgggagccaatcacaacacattttaaaagattcattttctgttactctgaggatttttcagattggagtgtttgtcgtttgctttgtttctttctttttgaaggacaagttcccctttgttttagagatttacttgaattctaaaaaaattagaaaacttatttcagtcttggttrtccaagtagtcatgattccttacctccctttaaatctgtggatgattcagatttttaaaaatgtttttaaaatatatagacttccattatttgaattttgttagccatwtcttggctaaaaatcttcagaaatgcagaaaagtatagagagtaaatataagawgccctcattatccgccagaattcagctcctagcttttagccagctcacaactgatgttatttttgaagsgcttcacatttgtactgtgattatgaaccatttgtactatgattatgaacaatattgccaagaatctacatatagaattttagtacgtttctttttgaggaaaatttttcctggacagctttatgtttaatactgtacctttaaaaacatgtaaaaatagcaaatatagatatatttggtcttatgcattttgaaggttttatttttataccatcaatggagtatttgtttaaataactttgaatactgatatctaccaaacttgtaatgcatcacagtgcagcatattcaaatgatttttagcagaatattgtcaggaaaaaataagaaaattttcttactattggacccataccacctccttaaatatatattgggaggatatataatatacccagtagcacactggcgtgatgtagaagtaaaggagattacatttaaggacattttgttttattattttagtttgcttcctgaacaatcttaaatgcctaatgtaaattgaagaattgcagttctgaaaagcaaaatacagtattgagattcaactgcatttttactttcctttatgccttaactgctgtacacagacattctgatgtataatgagaacaaaggattcaaaagcattcacttagaaatcctcccctgtttttttagttgcaaccctaaatctgtgtattgttttcagactacttaggccaaaaacaattagaaattcatcaatggaaaatatttagaggtcacttaaaaaaataaactaaatgcttaaatggttctgcattttacaatcggttcgtttcaaacagcagtttaatgttttgtcccttctaaatatattaattgagaaatatgatgggatttcccagaagaatacattgtattagctttaaatcagtccttccccctttggtaattttatgtagttatcttagtaaatattatataattatttttagatgagagaagtatcacatttttaaatgtttgttgaatgatctagtgcatttttttagtacatctagctatgcactccaaaaccaatttgtgagatcaactaccagttgagaaagcacttatggtaatttttgtggttattcatttagctttgctggactgaaacttttatatggatagcaaaaaaggaaaacaatgttaattccttttagaaaatacccttgtgttataacttaatgtacgcttcagaattatctttaggaaattccttagaccgtcttcctagagtagagaagtaattgcttcaaatattgtcttttataattatgttaaaatgaaatgttgacttccttggagtcccttataagccttggtagggaggtgggcatgtgatggaggatttctccaatccatgtttttgtgttttaaacaaaggctggaaagtactctgggaataatgtatatgaccagaaagatgaacatgcaggatgtcacttatctagtctgtacaatatttagattcctttcactggcttttttcttcagttatctgtactaactggctattttggtgaattgtttaagcaaactgccaggaaaattatacttcgttctttatattcttttagaaaaatccaataatatatgtagcatatctgcaggtagcatccacatgttctctttgggcaacataatccttatactagtttgtgtacaagttagaagataaacctgtgataactgggtctctatctatctttatcaatcactcccagaaggcttcccttgttttgctttattgagagaagtgcaaggagggcagcagttcctgtatagactgctgagattctagcaatggtgaaagctttgcctcatctcctatcttttatgaaaaaaaagactttgtcatgaccaggtagttcttaatagcaacttttagctcataacatgaacaattttaggtcaaagagatatttcattgaatgtgtgtttaaaatgtttagcagactcttttctttggaatatgctttgcctaatgagtatatttttccaagtgtgaatttatctgtaaagcaaattttttttaattattatactttaagttctggtatacatgtgcagaacgtgcaggtttgttacataggtatatacatgccatggtcgtttgctgcacccatcaacctgtcatctacattaggtattttgcctaatgctgtccttcccctccctacccgctsataggccctggtgtgtgatgttcccctccctgtgtccatgtgttctcattgttcaactcccacttatgagtgagaacatgtggtgtttggttttctgttgctgtgttagtttgctgagaatgatggtttccagcttcatccatgtccctgcaaaggacgtgaactcatccctttttatggctacgtagtattccatggtatatatgtgccacattttcttaatccagtctatcactgatggacatttgggttggctccaagtcttaagcaaagagttttttaaacctgtgtatgcatgacattttagctgtgcttttgagacatagctatggtttcccatactaatgctattccaaattctttatgggatttgagaaagaggagctagctatttaagtaactatttttatggttataactacagtcaaatccttcatctgtctgacctgcaatgataaaaatcagctatttactttaaaaggcccaaaagttatggaccaagtgccagaaagtgagctgggagaaagaactcaaataatattgagcatctactatgtgccaggctaaatagaagacacttctatattagcycattaaattatatgatagcccataatttactcaagaaaatataactttgtaaagagggacagaaaaaattttgaactctattataaatgtctacaaatattcttagaaggcccaaagtttatttttttcagtaggttataagatataatgctgagtgaacacaagcagtaacctatgttctgtataccacctgatgccagttttaaaaatatgtattcacatacaagggtagaaaaaaggcataaaaggaaatttaacaaattatctgtggttatcttccagcagtggggatttacattattttcttttttttggtatagctttctacattttctatagcacatgtacattttataattagaaaggagttataaaaacatatgaacaaagaagtgaatttagtgttcctgagtttgagactaagctttctagaccagtaatttaacaaccagaatttgtactggtcatgccagttctttgtttttttgtttgtttgtttgttttttccccagcatttattttatttttattatactttaagttctagggtacatgtgggaattgaacaatgagaacacttgggcacaggaaggggaacatcacacattggggcytgttgtggggtggggggaggggggagggaaagcattaggagatacacccaatgtaaatgacgagttctttgtttttgactacgctggcatgcgaatacacatttctctcatccaacagtccattgaaatggttgagggttttttgtttgttttgataacagttaaatgcggagttaaaacttaatctagatggtctataagattgactttggaagttatttagcaaacggtatagagttaggccatcttggtatgaattatgcagagaagcaaaataattctaaataattaaatactaagaattatatttcaaacatcactaaaatatacattcaacacttaccttcatacttaaatgagaatttatggtgaaatttcaaattttaaaggctaatctgatgattagagtaaatgcatctgacttttttttgtcaagtatctaatagcagttactctatgtgtagaaaaaatacattgtttctgtatattaaggcaaatattaaaggcttattaaaaggcctcgtcgggttgttttcagagtcaaaggactctgaaatgcttaatgcttaagaaacagctgatgggggtgggagaagtgtaaaatctttgggagatttggatactggtaatgccatgtggtgttggtaggttaattccagtgtttctttcaatgaaataggcactatggcatcagtaataaaaactgtgaagtagattgttgaaaattgacctgtttcctatttagtgacttgggaaaatggtaaattttgtggatgttgagaaacaataagtgttatactcttacttgaaaaacaacttttaaaaggaaacattatacagtatttatttaaatattttacttctccatagtcctggaagagtactcaagtctattaagttttgctttggagtaaaagactaaattttgagcccttgatcagtatatatattcatttctgctaatgataaattaattgaagaaagcattccatgttttattgtatggcaacacttttatgtgctataaattagtttctctcttctctaaataactaataatacatcttaatttttaattcccttttctttgcttatttctcctgattttcccttcagcccttgggagtctaaatttgtgctggtcagtctggtggccatgagccacatgtgattatttaaattaaaagtagttaaaattaaataaaattcaaaatttggtttctcatttgcactagccacatttcaaatgcttagtaaccacctgtsgctagtgactgctataattggcagcaccgattatggtgttttcccctcattgaagaaagttctgctggaaggcactgttctaaattgtcaggacaacttaaaaattctttgggcatatcttcctgtatctcagagtatgcatatatatttcacttaaattttcctcttctattatttcattttacttttctgtttttcagtttaaaaggatgcttaatcgggagctcacccatctctctgaaatgagtcggtctggaaatcaagtgtcagagtttatatcaaacacattcttaggtgagaataacaacatgcaattaaatttttttcttcagttgtttgcttgtttgtttttgtaggaggattggggtgccaactcattttggaaaccaaacaagtgttagaagttctatttgttttcattcgtcatattaataattcgacactatccgcctctgagttttagagttgcaggtgacaaggtacattttcttagttttatttaggactttaggaattcttgaattaagattatatattgccattttttcatagtaccaaactgtaaaatatattttatagagagatctattcatatcttcaacaaattcttattaaatgccagccattgttgggcaataggtgtttaatgataaattagaaatgattcctgccctcgatgaatttaccgtcttgtgtacatcaagcctagtaaactggtgggcagataaaatacaattgctaaataaaagtttgctaataatagctgagtttggtgtcctgggacaactcttgtacctcatccacagaaagaaaatgcagtaaataaaggtcagtaatttgaatgtatcctggacttactttcaaaacaaaattgctgttatatatagttaacatttattaaacactctagaatatgttctatatataaggatgagttagagttgctcatcactgccttgaaatcgtggatgaaagtaagaagatatcttaggtcttttactatagaacacaattagcttatgtacgtattcacttatcaggtaatatttatgattctctatgctcccataaaacctggggatttaacccttatctcactatcatacagaaataaaaagtagcagaattaatctaagtcatccaaaacctgctgtttcagctcccacagtgttacccatttcagttagctgttagttttatatactgctgttttcatgacatttgcgtataaagtttctaccatttcaaagtatgtattgaaactgtagtccttagttggcaagaacaatattcagttcattaagtyagtttcacaaaggaatggaattgaacagtggaaataaccacctgttgtgtattctgagtctgctgtcatgctaagtcttgcagcattttttattaggacattgtatcaaagaggtaaccatggaatacatttgatattattattttgtaatggaacttatttgcttaattttgtgtttgaagacatcaaattaagtccaattcaaatgtaaatactgaactctctaaaaggaaactttttagttggaaacatttcctggaatatataatgatcaattataatccttccaattatgcatatgatataaaacagatagaattaataataaatatagaacattttctaaatttctcaagataagcaacatgaagtggaaattccttctccaactcagaaggaaaaggagaaaaagaaaagaccaatgtctcagatcagtggagtcaagaaattgatgcacagctctagtctgactaattcaagtatcccaaggtttggagttaaaactgaacaagaagatgtccttgccaaggtatgatgatttcaaagatcaggatcataaatattaaatgatgccctttcatgaattttcacttctagtcttttaaatggatagaaaagtttattaattggggttttttttttttctttttttgaagatgggaaggcattttataaagctccttttaaagtgccttagacaggtggtttggtatgttttaggggtttggggggtgattatttgcatcttcatttcattgtttggccttaaagagttagaaatctgtcatgtcttctgggttttaggaaaacagttaaggttttgtgaatagattttatccattaaagaagtgctttgtgattgatacttaaaaagtacataaatgtgttgtaatgtcaaagtcacaaggttaagccatactgttcaattttcagtacatttaagtaaatgtgcctaaagtttgcctatgcttacatggtgtgtctgttaacatttaaaatgaatcattgtttaaaacaatctaacaatctttacactgaagtctgttttgttttgttttgttttgtttgttttgagacatagtctcgccctgtcacccaggttggattgcagaatgcagtggcgcgatcttggctcactacaacctctgcctcctgggttcaagcaattctcctgcctcagcctcccaagtagctgggattacaggcacacaccaccacacctgactaattttttttatttttagtggagatggggtttcaccatgttgggcaggctggtttcaaactcctgacctcaagtgatctgcccgcctcagcctcccaaagttctgggattacaggcttgagcctctatgcccggccacctaaggtctgtaatttttaaatgattgtgttcattgagtcatattttactccactttctaatattttagtatctttttttttttttcactccaggaactagaagatgtgaacaaatggggtcttcatgttttcagaatagcagagttgtctggtaaccggcccttgactgttatcatgcacaccatttttcaggtaaggtggttgagttstattacatttattttatttaggaacttaatgtccagtctgtagcttatgcatacattttgtcttttttaatattccccaccttttgcttatttttatacttttatccttatttgctcctttgccaagggacaagtaaagatacagaaaggtggagtgtggataaaccacaaataacatcaattttgttattttttttgcatttaagaaaaagatgtgatatagccaaattgaagcaatttattaaaataataatttagacatcatcttagtcatctgaacctgactgcatagagaatggagtactaacttaaaaaaaatgaataaagcccctgctggctactaaccttagaatatagttttttcagtcactttcttgtgtcctgcttctttcttcatatccatttctctctcttattgaccctttgctccagcttagggtgggatttaaatgagaagttgaggctgctgtagatatctcgggaccgaaatgggaaacttcagccctagagaggacgttgatttttagttggtgtgatgcaggggttgagttaatagtgcttgactggagctgcctccatgataatgggacatagaaacttttagagttggcacctcattcctgacaccatacagctagggcgtagtattcttgggttccagcaggacaacccaactctggttttgtcccagagtccctggatcttctcagaggttcccattttcctcactagacatgtgagagtgcagttgccatttccaggttatccactggcaacactggtgtgtgatttttttttttaaacatactctatggagaaatttttcacataaagacaaaaatgttaagatgattttttttcctacaggaacgggatttattaaaaacatttaaaattccagtagatactttaattacatatcttatgactctcgaagaccattaccatgctgatgtggcctatcacaacaatatccatgctgcagatgttgtccagtctactcatgtgctattatctacacctgctttggaggtaaatctgtttctgaaatttcaagaacactaacttgccactcataaaggtctattaaacttttatctgaagggttttcaatggagaagataattggattcattggaagtataacttattgacttatgggggaaaatgctatagttaatagacaatcaagtctttgatggattttgcttatgaaagttggtcacagatttagtgattgatctgtttatgatattgcttctttgaaatgatccactgaacatttcataaagcacatctggcttactcactttttgttcatttgttttcttgaaatctagtctgacggcttttatttataggccaaagaacgttttataaaacataagcaatatattgatattttttcatagaatatattagaaggacatactttaatttttctaaatcctaagaagttatttcattagttgtttactaaagcaatttgattttcttaagaaatatattttataattcagtttgttttcattataaaattatgttaatacctcatcatatgggtgagtgattctcaactggagatggtttctcttcccctttctttccctcctgccaccaccagggacatttggcaatgtctggaggcatttttggttgtcacaactatcacatttttagttgtacatgatactggcatcttgttggtagaggccaggaattctgctaaaaatcctacaatgcacaggacagcctcccacgcaaagagttattgggcccaaaatgtcaatagtgctgaagttgagaaaccctggtttcgatgaaagaaaataattgctaatgtcttactaattttatgtacattttcagaatattcttagacatcttaaatatttagaaaataaactattattttcttttaaaataatttcagagttttaaaataatattttaaaaaatacagtgaatggaaaacatttgatcatgagatgtaataaaattagataaaatattttcttccaagattatactttaaaagttcacaagtatctaagactctcccttgacacattgtaacacattttgaagcttcattttgttttccatttaaattctagagatttcttatttgtttatacttttaattcatatcattgtagaatagtaatattatctatattgtctgattttccaggctgtgtttacagatttggagattcttgcagcaatttttgccagtgcaatacatgatgtagatcatcctggtgtgtccaatcaatttctgatcaatacaagtaagtaaactttattttttcagaacacatttttcccttgtacattttagaatgactaagggtctttataaactcagagtcttccagagccataatgttcttttgagatgtgtatatatgtgttttagtgatagttcatgttaatgtaatttaactgaaaattatcattatatcccttgaggcatgtgatatttgaaaaatgtgttccagttctctttaaaagtaatatattgctgtgttactagacaagggtaattaaaaatgaaagtgtgcagaaagatttagaaagttgtattggccctaaagttttaaattaaaaaaaaagttatgagaattaatggtaagtgttcctcactttatgtaggtcatcatttaatcctcttcagaggccatagcttcccttcctcctccatgcccaacccctgttctttcctttttaaaatcttctaataagggtaacaggaacttcttaatattytttcaaccatttggttttttctcactgttaacatctcaccttataagaagtcatcactgaatttggaaatataaggaatagtagagactgtttaatatggagcatctctgacattgccgcacagaaagcctgtgtagggaatgtttaggtaatgcttgagctatcccttggtaaagagatttaggtttatagaaattctatttggtacttgaagttaattggtaagtgatttaagtgaactatgacttaattccctcccatatggtagattataaattatggtagattataaaatcataaattcacttttatatataaaaaatatgcaaagttgttgaaaatgttgtatgcttaagaatccacctttctttcatttttgcttgaggctatgaataatagtcttctcgtgcctatagcaatctagctatagaattatttatgaattcaccattcatttcctgtactttgctgtagccagatttaaagaaggaatgtagaggtaaccttgctttgagagatttaattcagagctttaggattatttacctatttttatatcttataatggcctctggactatcctatagcaaaatatactctaatgactcatccatgtagaggactggaaaagtcagggatttcctgagatgtgtggttagtcaagtatttttttacaagtttagtttaggaacttatttatccagattagacaggataacatttcatgttctacctacctatgagcacctataatgaggtacttttagaactcatcaaagcatacatacaaatattaatatacattggatgcagctccctgcatttacatggtatcagtggggaggtatcagtggggagggttcattatgtcctttctaagaagagcagggaggtcatgcaatacagtgcatgctggcactttacatgagcctggcctgatttattttgatgcttatgaatgtcttgagatattctgaattttatcaatttttagtaaatacataaaatgtatttttacataaaatttttgtgttaaaggtatatatatatatctatcttaaacaccaaacattcaaactggtatgttttctttgcattctgttatatagcatattatatgttcccttagaattaagagtagatttagaagacaaattaaaacaactgatagaaaggtcactgtcttccaagtactctgatacattttttaagggtaatgaggacctgctctattcttcattcttttgagcccttaaagcagcagtctccaatgtttttggcaccaggcaccaggttttatggaagacaatttttccataaactgggggcgcagggagagaatggttttgggatgaaactgttccatctcagatcatcaggcattagttagattctcataaggaacgcacaacctagatcccttgcatgagcagttcacagtagggttcacgctcctaggagaatctaatgtccctgctgatctgacaggaggcggagctcaggcagtactgatgcgggcttgcctgctgctcacctcctgctgtgcagcccagttcctgacaggccacggaccgatattggtccacagccgatggatggatcggggacccctgctttaaagggcacttgggctttgactggcacctggaggaccctggcatcagggtccctgtgcagtctgccatttaagctaacaaggcctcagtctacagatgaatctgatactctaaagtttgagaaccaatgaaatagtggaggaaactgaagaagataattttatctccttaggatgtctgtttaaagtcattttgctggtgacctgcctgggatggaaggataactaatcctgccgctgcaaattctttctttgttatttagtaatattgcaatgatctcctttctgtgtgaccacagcgacatagggaagttcacagttgccagagtagctttggattgctaaagtttttttgacgatgaggtgtgatgaggctgtgttattcctgagggaatgaatcagcattgtcactttgtacaggaaagtatcccagggttgttccgggccccagggcattatcaaaattacagccttagttagtttggtttggctagggatcatgtaagagaattatcttcccagcatgcagtaaaggaatccttctaataacttgtaaacttgtgatatgtagcttcgtgaaatattttatcaaaatttgtgcttatttttagtttgcagtaaaccttttttaaaatttgactttttatattttatggatggcttgagcatccatgtgtcaagccagcacattctcagctcttgcctcagagctggagctgccatcctgtccaaagcctgcagctgaatccatatttctcataataaagaattctaaagacctctgattatcaaatttataaacccatagttggttacttgtcttactttaaggaagctacggaagcactgagagcttaaggcacatggggggcgctggggattcccttggctggttcccagggcagttaatcctcctgcttcttacatgtgctcttcgtttttcttaattatttcagttgttttagctttaggtgccaaatgattttatactaattgtatttacactcgttgaaagcatgctggaggttctgcaagcagagagaacaattctacctggtagagttggttaagctataataaatgatttgagtgtgggtactgtgaacaggatttagagaaattgaaatttcaggcaggaagctgcgtaaatatttttaaaggatgatgcatataaataaatccataggccaggtgcagtggctcactcctataatcccagcactttgggaggtcaagatgggtgaatcactgacgtcaggagttcggagaccagcctggccaacaaggtgaaaccctgtctttacaaaaaaaaatacaaaaaaattagccaggtgtggtggcgcatgcctgtattcccagccactcaggtggctgaggcaggagaattgcttgaacctgggaggtagaggttgcagtgagccgagatcataccatcacactccagcctggacaagagtgaaactccatctcaaataaataaataaataaataaatccataaaatgtaaatagcagcatgaacttttgaatataaaatgctggagggtatatttaacttagctttattttctgaaaaaaagtatcaaaagtacagaatatagcattaaattttacttggcaaatgaattatttttgttaatagcaaagatgcctaagtttggggcagaaagatttattcacattagtgatgcattcaaagcatgcggtttttggtttccaagagcagaggcatttcattatattaaggttaagatgtatctagctgtcagtatacacttttttatttctctacttttattttgaaattaaaattttcatagctacactagtagattgtatgtagaattttatttttctgtataaacccacaccttcaaaataaggataaattcatgtttatcaaatgtgattatatagatatagctacagagattattttattcaacaamaatgtactgcaagcctactaaatgttataataaatattatttcaggcacttaggacacatggstggacaagacaagacaaatccctggctcttaagagctggcattctgctagaaaaggtggagcataataagtgaatttatggcatgtgatggtactaagtgctatggaggaaaataatgcagggtgagggcatagagagtggagtgatgaatgaggcagttttcttgacaactgaatattaagttaaaaccaccacttccctctgtcatttcatggagaaatgtttgtttctgaagtccttttgaagatttatgtttatttcagttgtaacttagagacatggtgtagcatgctgtcattttctaactaactcaaggctaagcctagtaaagctgtaagaacagtgagtgtaagtcttacttacaggatacatatctatagtgtctgccccagtcttaactgtttcagctccaggtcttaatattggctctgatctgccatgtggactccatcataagacacaaaaaggcacaatacctagtggacttagttggatttgggaggcaatgtattccttctttgtgtgtgttactctggcccatttactaagtgatctgaaaagctgctagtttagatggggcacagaacaagagagtgtcacaaaaactgctagttttgagtggggctctacaacaggtccagcctgctgtgcaagctgctctgcacatgggccacatgatccagcagatttaatggtgcttgaaatgtcagtggcagataggaatgttgtttggagcctttgacagagccctctgtgtgaatcacagcacagactctggagcaagaccctgccatcatccaaagaaagataactaactactctccttttgaaagaaagatataggcctgctgctgggccttaggagatactgactgactatgggccaccaagtttccatgtggtttaagctgtctgcccatcattaatagggtattatctaacgcgccaagccatatgttgggcatgtacgacatttcatcatcaaataaaagtagtgtaatacacgatctatcaggtccgagcagacactaaaggcacaaattacataaagaagtggccctaatgccactcctattaattacactgccttctttctcccagcctacacatgtggtcgcatggaaagttccctgcaagtagttgacagagggcctggtttacggatggttctgcgtgatacgcaggtaccaccggaagtatacagctgcagcactactgcccctctctgggacatctctgaaggatggtggtgaaggggagtctttccagtgggaagaactttaggcaaggtgactcgttgttcactttgcttggaagagggaatggccatatgtgcaattatataccagttcatgggccgtagccaatgatttgtctggatagtgagggacttagaaggaatatgattggaaaactggtgagaaagaaatttggggaagagatatgtgaatgatctctctgaatggacaaaaaaggaatgctcaccaaagtgtgaccttggcagaggaggattttaataaccaagtgaataggatgacccattctgtagatactagtcaacttggttccctagccacccctgtcatcacccaacatgctaagaacaaagtggccatggtggcagggatggaggtggcaggatgtgcttagaaacatggacttccactcaccaaggctgacctggctatgactattgctaagtgcgcaatccaccagcagcataaaccaacactgaacccccatataacaccattttggggggatcagccagctacctgatggctggttgattacattggaccacttccatggtggaaagggtagcattttgtccttagtggaaaaggcactttctctggaaacagatgtgccttccctgcagtttttctgccaaaactatggtattccatacagcattgcctctaaccaggaactcaccttactggcaaagaagagctgcactgggctcatgcccatggaagtccctagtcttaccatattccctaacatcctgaatcagctggcttgataaattggtagaatggccttttgaagactcagttactcagctaggaggcaagaccttgcagggctggggcaaggttctccagaaggccataaaggccatatatgctctgaatcagcatccaatatgtggtgctatttctcgcataaccagaattcatgggtccaggaatcattggatagaaatgggactgttacgactcataattacccccagtgacccactagcaaagtttgcttcctgttcctgcaaatttatgtgctgctagctagaggtcttagtttcagaaggaggaatgcttctatcaggagacacaacagtgattccgttgaactggaagttaagacctagccactttgagctccttatgcatctgattcaatcatccaagaagggcattacagtgttgactggggtgactgatcctgactaccaaggggaaattgggttactactccacaatgaaggtaaggaagagtatgtgtggaataaggagatcccttagggcatcccttagtattaaccatgccctgtaattaaggtcagcacaaaataacccaatccaggcaggaccactaataacccatacccttcacgaatgaaggtttcggtcaccccaccaggtaaagaatcatgaccagctgaggtgcttgctgagggaaaagggaatacagaatgagtagtaaaagaaggtaattacaaataccagctatgaccatatgaccagttatagaaataaggactataattgtcatgagtattttcttatgaatgcatttatatgtatatatacatatattaagcatatatcttcattttctttttcttattcccttatataacataagaggtattaacttatcttcattttctttttcttattcccttatataacataagaggtattaactttatattagtatttaagtatttattttatatcatagtatttaagttataggctatcaggataagagtaaacattactcaaaaactttactttcacttctggggaatgtgttagtgtgcttttagttgtatgcaggatagttgtagcctgtttggtagaattatggccttatggagattaaatatggttaaaggagatgcttatgggtaccagggtgacaaggggcagaatttgtaatggttaattttatgtgtcagcttgactaggctaagggatgcccagatagctggtaaaacactattttggggtgcgtctgtgagagtgttcctggaagagattagattagcatttgaattggtagactgattaaagaagattgcccttaccattgttggcagggatcagtcaatccattgaggacctcaaagagaagaacaaaaacattgggggaaggggcaaattttgctttcttcggagcctggacatacatattctcctgcctctaacatcagggttcctggttgattctctggcctttggacttgctttcctggttcacctttgcagacatgggacttcttggactccataattgcctgagccaattcctataataaataaatgtgtctttttctcacatacacacacacactcatacatatgtctattctatttctctggagaaccatgattaatacagagagagaaaagattagcacagatgaagtacatgttctcagttatgtggtagtacctgcccacccttccccccatttcattagcactcagaagagagggacacaaaagtggtcttcctgccttcagtagtagcatatgttgggcataatttaatttattcttgatgatccagggtagttgtaacaaatgagcacaattgatctatatataataaaatgatggctttgagtttgtaaaggtatgcatggcctctcaataaaaaataaatacttacaaagttgtctttataaatgtgtgccaggcactgagtggactgtgttgatttcctggttcatgtttagtgttcactgctcaggttttcacctctataaggtacttgtaatcatagtcagtataaggtgagggctctagaaactgcctggttttaagtgctggccccagcacttactggctaggtgatgttggcaaagttacctaccttctctgaggtacattttcttcatttgtacaggattatatgagtatgtctatgtaaatatttatgtgtataaaagatgtccccaagggacattttctatcccccagcctatcccaaggacacaaagacttacttcccacctatatggctccatgccatccatgaatggaacatagccttaaaatgtcgataacaacagtatcttcctaaaagagttatgaggattaaatgagatgattcacataaaccatttaacacaatggcacctaaatcctctaaatgttgtgccttgctgtattcctgtttgtactttgtaagtttgaaataattgaagtgcctaggggaagccagataaccaaacatattaaattaataacctttaatattttgtaggggcttaagtctctaagtaggttgggagggtttggggaggaacgattaaaagatttgtagagataaagacaaaaaaggtagaatgcgatacatgctaaatgggtggtacaaagtagtatagaagtttacaggagaaagtgggcagtttcatctggtaattaagaaagacttgatggaagaggtaacttatattgggcttgaagatgaaagggtttcaacaaaaatgttatataagctaacctctttgcccctctgtgctgtgcactgtaccatcctgacagcaactttctgatcattcctgaaccttcaaggactctacttacaagtaatggattagtgtctttgatgaaaatctgctgaggagctgcagactcctacctcccaatttaaatgtgaccatatgccttcagtcctaaagaagagtagaaagttaaataacttccttgagattcagtttcttaaatgctaacatttgttcatttaaaaatcaacagtcaccaccactttcctgtaacagcatctgagatggaagaggctatggaggcctgccagtccactaaggcatcctttcctggcttttctagccaatctggactctttaagtgtcaggagataaccactctccaagacaggccttgccagtattcttggacatctgccctacatgaaaggccctacttatatccagtagaactcagactctttgttgcaccttccatacaacagatcacccttttccttgaaggaagagctcatcatcttattcttttgcagggtcaacagccttaatttccttcaccttcagcttcatataagccaattagggtttttgtaaggctaagtcaattctgttaacactgcttgtctacatgcatatttccttccttaaacgaactctaataattatccagtatctaataattatgccttcctttcaatatatgtttgtttatttgattccactgtagaaatacaataatatgtgctaagaacctatatagttttaaatttttcatttctatatgcttacctatctgtagataaaggttcataaaggcatttatagacactataaaagttcaccagaaactgccttttaaaagataaacactattgttttatctaaagaaaacaaaaaataacaaaaaaatactgtacaaacctactccctactagtctaaacagctctgctcctgtagtttgggagcagaaatttaagtgtgcaaatttgtatttctatagttccgataaaataatagaatttctcagttgaaaatgtcttaagcctctcctctccttcctagctccattaaaatagccattgaatagtattgggtatttctttcttaaaaaaagatatatatttccaaatatattttctatgcattcgttatatattttctatgcattcgttagaaaaaagatcaaatacctgtgcttttaacctttttcttttcttttcttttctttttgaaacagagtcttgctctgttgcctagtttggagtgcagtggcacgatataatggctcactgcagccttgaactcctgggctcaagcaatcctcctacctcagcatcccaagtagctgggactacaggcacgccctaccatccccagataattttttattatttgtcgagatgaggtctccctatgttgaccaggctggtcttgaactcctgggcttaagcaatcctcctgcctcggatttgcttttagtctttacagtgattaagtggaaagagaataaagcatcaaaagttttttaatgattatcttgtagctctgggtctgctatttacaagaagtaggagagaggcagaatctctccctgcctaaaattcacaggtctagggcagtagggagagagtggcagaatcttcaccagagggtatacagacagccaaacacaacatcactgtgaagctgtgagcaagcaggcaggaagagcaatatccctgtacagtatacaatgactgccacgatacttggaaaagaaaatggaaaacaatgaataaagcttggactttcagagctatacatgagcaaatgagcaaatctaaacttgttcatatgattccttattgttcttgtaccctctttgagtacaaacaatcctgtaacacaggatcctcactttatatagtgcagggtaggtaattcacagttatcaggaatacaaaaccttatgctctggatgtgttatagatactaagaataatgtcatattctgctgagctcatggcaactctagaggagaggttaaagatccaattctttcactttagagaaagctgagacctacagagtgaaatgacctgccacatgttagtagcattagaattcactccccaagattcattccagtgttgttcctgctcttatgttatctgatttattctctcctggatattgtcaggtaatgataagggcagcagagaagtttaggggaaattacatcctaaatccagaattttaagaatcagataaacttctcacaaacagttttgctgatctttggccttttgtcttttttacagactctgaacttgccttgatgtacaatgattcctcagtcttagagaaccatcatttggctgtgggctttaaattgcttcaggaagaaaactgtgacattttccagaatttgaccaaaaaacaaagacaatctttaaggaaaatggtcattgacatcgtaagtagctgataaaagccaaagaagagaactgtgatgcaagttgtttataatttagacataagaacaagatgagtattaggtaaaaggaactgcatttcaaaacatattatggccctttatgttatagaagctgcccgtgatgctggctgtgatgttctgtaataggtttttcacttctagcagtttggacttgagaataatgtcagctcaccctcatcatttattttctgggcccctccagtctggtggcgggcagagaaaaatgactaacaaaagcagattgtgtgggccacagctcaaatggattttttccccaccttttctcatcagtagacagtgccatttagacatccatgactttactcttttttctatgcatcttattcagtgattatgagacacaggaaaatctctagctttcaaaaacttataaacttgtgatgatgtcttatccatggagatgtcacccatttttcaccatgaaagtggttgtcagtgcctagcatttctgtatattacacacatttatctgggctttgggaaaacttgatagcaaaggggaaaagactctgcccccaaggagtagtaaggattttccactgtcattaaaaggcatagtgttgttttattcctttttcattcttatattctgcgtaatattttcatgtgtaaattctgttttctctgaacttaataatatactctatattttaaggtacttgcaacagatatgtcaaaacacatgaatctactggctgatttgaagactatggttgaaactaagaaagtgacaagctctggagttcttcttcttgataattattccgataggattcaggtaaagccttgtttgagtttgctctgtgtgtgtgtgtctgtgcacatgtgcacatgtctgcgtgttcagctttgataagatgtatttcttccttctcccaccttatactttcagcaattgtaggcaggatttttatccaaatttttattcctgagaattaaccaggtaaaattctactggtctttctgtttgcatctacattaattaaaaaaactaacaaacaaacaccccacagaaccagccacttaagcagctctgaatctagtcagccatgcacataaacagtttctcttaagctatttagatgcagtagaagtggcataatttggaactattaatacaagtgtgaactatacacagacacatcatggttgagctgtttggaataaatcttacactacgtgtatttttaagtgtygcagtcatccaatgtgaatttctagttttttttgtttttttttttaaaaaaaaggaacaggagtgaatagagaatgcatccatctattttaggttcttcagaatatggtgcactgtgcagatctgagcaacccaacaaagcctctccagctgtaccgccagtggacggaccggataatggaggagttcttccgccaaggagaccgagagagggaacgtggcatggagataagccccatgtgtgacaagcacaatgcttccgtggaaaaatcacaggtaatgcatgaagtgtatagctttcagagagaacagagctaccgctttagcatttggttactttgtattacatatgatagtattttactggatttttaaaattactttgtttttgacaagctcaatttcaccttagtatttatgatccaaagaactttcattcttatgacttacattcatatagtcatatatatattctaaagacatattcatttattatgactatattcatttaatatattcatatacatagagcacatggcattatttcagttatctggattcacctacaaattggtgattgtaaaataagccctaccatgtcaacaactggaaaattttttatgctatagaacatgctctttaaccaaaggttctagaagctaattttgaccagctagtagcaatactttactttaaatggtctgttgttgttgaaaatagtgacaattttaccaaactaagtttagtagtcttctgttcagtgttttatttgtgggccatgatctaattaagcttttccattgtttcttagtcccaagtcctctactcatactggatttttttcttaactaggtgggcttcatagactatattgttcatcccctctgggagacatgggcagacctcgtccaccctgacgcccaggatattttggacactttggaggacaatcgtgaatggtaccagagcacaatccctcagagcccctctcctgcacctgatgacccagaggagggccggcagggtcaaactgagaaattccagtttgaactaactttagaggaagatggtgagtcagacacggaaaaggacagtggcagtcaagtggaagaagacactagctgcagtgactccaagactctttgtactcaagactcagagtctactgaaattccccttgatgaacaggttgaagaggaggcagtaggggaagaagaggaaagccagcctgaagcctgtgtcatagatgatcgttctcctgacacgtaacagtgcaaaaactttcatgccttttttttttttaagtagaaaaattgtttccaaagtgcatgtcacatgccacaaccacggtcacacctcactgtcatctgccaggacgtttgttgaacaaaactgaccttgactactcagtccagcgctcaggaatatcgtaaccagttttttcacctccatgtcatccgagcaaggtggacatcttcacgaacagcgtttttaacaagatttcagcttggtagagctgacaaagcagataaaatctactccaaattattttcaagagagtgtgactcatcaggcagcccaaaagtttattggacttggggtttctattcctttttatttgtttgcaatattttcagaagaaaggcattgcacagagtgaacttaatggacgaagcaacaaatatgtcaagaacaggacatagcacgaatctgttaccagtaggaggaggatgagccacagaaattgcataattttctaatttcaagtcttcctgatacatgactgaatagtgtggttcagtgagctgcactgacctctacattttgtatgatatgtaaaacagattttttgtagagcttacttttattattaaatgtattgaggtattatatttaaaaaaaactatgttcagaacttcatctgccactggttatttttttctaaggagtaacttgcaagttttcagtacaaatctgtgctacactggataaaaatctaatttatgaattttacttgcaccttatagttcatagcaattaactgatttgtagtgattcattgtttgttttatataccaatgacttccatattttaaaagagaaaaacaactttatgttgcaggaaaccctttttgtaagtctttattatttactttgcattttgtttcactctttccagataagcagagttgctcttcaccagtgtttttcttcatgtgcaaagtgactatttgttctataatacttttatgtgtgttatatcaaatgtgtcttaagcttcatgcaaactcagtcatcagttcgtgttgtctgaagcaagtgggagatatataaatacccagtagctaaaatggtcagtcttttttagatgttttcctacttagtatctcctaataacgttttgctgtgtcactagatgttcatttcacaagtgcatgtctttctaataatccacacatttcatgctctaataatccacacatttcatgctcatttttattgtttttacagccagttatagtaagaaaaaggtttttccccttgtgctgctttataatttagcgtgtgtctgaaccttatccatgtttgctagatgaggtcttgtcaaatatatcactaccattgtcaccggtgaaaagaaacaggtagttaagttagggttaacattcatttcaaccacgaggttgtatatcatgactagcttttactcttggtttacagagaaaagttaaacagccaactaggcagtttttaagaatattaacaatatattaacaaacaccaatacaactaatcctatttggttttaatgatttcaccatgggattaagaactatatcaggaacatccctgagaaacggttttaagtgtagcaactactcttccttaatggacagccacataacgtgtaggaagtcctttatcacttatcctcgatccataagcatatcttgcagaggggaactacttctttaaacacatggagggaaagaagatgatgccactggcaccagagggttagtactgtgatgcatcctaaartatttattatattggtaaaaattctggttaaataaaaaattagagatcactcttggctgatttcagcaccaggaactgtattacagttttagagattaattcctagtgtttacctgattatagcagttggcatcatggggcatttaattctgactttatccccacgtcagccttaataaagtcttctttaccttctctatgaagactttaaagcccaaataatcatttttcacattgatattcaagaattgagatagatagaagccaaagtgggtatctgacaagtggaaaatcaaacgtttaagaagaattacaactctgaaaagcatttatatgtggaacttctcaaggagcctcctggggactggaaagtaagtcatcagccaggcaaatgactcatgctgaagagagtccccatttcagtcccctgagatctagctgatgcttagatcctttgaaataaaaattatgtctttataactctgatcttttacataaagcagaagaggaatcaactagttaattgcaaggtttctactctgtttcctctgtaaagatcagatggtaatctttcaaataagaaaaaaataaagacgtatgtttgaccaagtagtttcacaagaatatttgggaacttgtttcttttaattttatttgtccctgagtgaagtctagaaagaaaggtaaagagtctagagtttattcctctttccaaaacattctcattcctctcctccctacacttagtatttcccccacagagtgcctagaatcttaataatgaataaaataaaaagcagcaatatgtcattaacaaatccagacctgaaagggtaaagggtttataactgcactaataaagagaggctctttttttttcttccagtttgttggtttttaatggtaccgtgttgtaaagatacccactaatggacaatcaaattgcagaaaaggctcaatatccaagagacagggactaatgcactgtacaatctgcttatccttgcccttctctcttgccaaagtgtgcttcagaaatatatactgctttaaaaaagaataaaagaatatccttttacaagtggctttacatttcctaaaatgccataagaaaatgcaatatctgggtactgtatggggaaaaaaatgtccaagtttgtgtaaaaccagtgcatttcagcttgcaagttactgaacacaataatgctgttttaattttgttttatatcagttaaaattcacaataatgtagatagaacaaattacagacaaggaaagaaaaaacttgaatgaaatggattttacagaaagctttatgataatttttgaatgcattatttattttttgtgccatgcattttttttctcaccaaatgaccttacctgtaatacagtcttgtttgtctgtttacaaccatgtatttattgcaatgtacatactgtaatgttaattgtaaattatctgttcttattaaaacatcatcccatgatgggatggtgttgatatatttggaaactcttggtgagagaatgaatggtgtgtatacatactctgtacatttttcttttctcctgtaatatagtcttgtcaccttagagcttgtttatggaagattcaagaaaactataaaatacttaaagatatataaatttaaaaaaacatagctgcaggtctttggtcccagggctgtgccttaactttaaccaatattttcttctgttttgctgcatttgaaaggtaacagtggagctagggctgggcattttacatccaggcttttaattgattagaattctgccaataggtggattttacaaaaccacagacaacctctgaaagattctgagacccttttgagacagaagctcttaagtacttcttgccagggagcagcactgcatgtgtgatggttgtttgccatctgttgatcaggaactacttcagctacttgcatttgattatttccttttttttttttttttaactcggaaacacaactggggaaatatattctttcccagtgattataaacaatctttttcttttttttaagtccttttggcttctagagctcataggaaaatggacttgatttgaaattggagccagagtttactcgtgttggttatctattcatcagcttcctgacatgttaagagaatacattaaagagaaaatactgttttttaatcctaaaatttttcttccactaagataaaccaaatgtccttacatatatgtaaacccatctatttaaacgcaaaggtgggttgatgtcagtttacatagcagaaagcattcactatcctctaagatttgtttctgcaaaactttcattgctttagaattttaaaatttcaccttgtacaatggccagcccctaaagcaggaaacatttataatggattatatggaaacatcctcccagtacttgcccagcccttgaatcatgtggcttttcagtgaaaggaaagattctttttctaggaaaaatgagcctattttattttattttattttattttttgacacaaactgtagattttagcagccctggcccaaaggaatttgattacttttgttttaaacagtacaaaggggacactataattacaaaaacatccttaactgatttgagttgtttttatttctttggatatattttcagagtggtaaattgtgtgtgagaattacaaatgattattcttttagtggtttcttagcctctcttacagcccacggggatagtactgtacatcaataccttcatatgaaatttttatatgcaatgaaaataaaagcatgggttgattctgcctatttatgactcaatcttttacaaataaaagattattcattttaaattatagttcaatcagcatgtctcttaggatactgaacgtggttgaaatgaaaggatagtgacatcataagttagtactgatattcataaccaaataaagccaacttgagtaattttgctacattaaaaattaccaaaattacttagatggcctataagattaagcatggtgttttctaagcaagctttgaaaggggccttccatacttacttaattgaatattctgggatattgaaaattattcagatacttgacaattatttttggttacctactccgcaaactacaaagttttaaggactcaacaataagttaatgagacacagtgtttgctttcatggagcttacagtctggaggggacaaaggcttaaacaatactcatataattatatatgtgatcagtacaatgaaggagctcagtggggtaaataagcaggaacctgaacttgatctgttccggagggccacagaaggcttccttgaggcyttgagaaagtgatttgcatctgagttctgaaggattgtaagaggtaactagggaaaaagttgacaggaagaggaaggggatccagacaagaaacatttgcaaagatcttgaggcataaatgagcttgagacatctggagaaactgaggaaaagtgagagagtaggcagggcctggagccgcagagccattgctaaccatcctgtgtgagatatcccccattctgtagctttattctcataaccctgctcaattttctttataacacttctcacagatttatatacgtgtttgtttttgttatctgtctctcccaccagaccacagctccatgagagcaaggtctttgcttaccaatatatcactagcacttaaaactatgcctggtacacagtaggttcttaatatgtgttgaatatagccatcaaattgatattggatataattcaatctgataagatattttgagatattaaagagtttttaacttgataccataaaaactttgtttgttttttgtttttgagcttactaagatcctggataaagagtttagagtttcctatctctttgctaactaaaaactctgtttgcttattcctcacaaattctacttttttctaaatgacaatccatttgtcatgataatgagagtaaagaaatcagcacaaatttaatccccagatcatccccagaccatgccagcagaataagggtaattaaacagagcatctatgcttagcctctccaccatttctcctgccacaacagtcctgacagccaacaggtgccaaatttgtgccttcctgggaataactgttttaaactcaagctcccttccccaaagccatgaccccaaagtgacactatggaactaaggaagcaactcccttcttttcctgacttgccacgcttgctgatttaggctaatttgggtggtggtgggcctgaactcacattaaaatctctgacctggaaacctttcctcaggcacacggctttggacccacaacagcaacattccaccaaaaaacaaaccaaaaccaaaaacattccctgttgctagagagtaccacctgtctaccaaggggaaaacaaccttgtgtcaggggaatcataccagggctttcccatccttctgatttgggtcctgcatcccacccagctactccgagagctccaaatactctaggtcaaactcagtgctatgggtataaatcttgaatttgtacacataggaaatactactttatttcctttaaatcaattaatctggactcggggctccagccaatcacactattggaaattcccatctctcattactgccacagctcctctctctcccaacataaaatttatcttatctccaatataatctgagtatcaggcctctgtgttgttccagcagaggttccttacagtccctcagctattagcttcctggtcacatgtggtgtaccaggaatatatgctggtttggggccctgcttccacacagtgtgtgcatcaaaagagcctatccttctggtgttttattacaccttgctgtggtctgaatgtctgtgttgaaatgctaacccctaggtgatgctattaggagatgggggccctttgggagataattaggttatgaaggcagagtcctcatgaatgggatcagcgcccttataaaagaggcccaagggaccttgttcaacctggccaccatgtgaggactcagctagaaggtgccatctgtgaaaatgaaagcaggtcctcaccaggcaccaaatctgccagaaccttgatgttggacttcccagcctctagactgtgagaagtaagtgtgttgtttataagccacccactttatggtattttcttatagaagtctaaggagactaagacatacctactgaaattactacaaaaaaaagcagttctcttcttttcctaattctcaacatattctccttcttctctctccttccttcttttgctctccaatgagatcaggcttaaaaccaaaaacgaaacagactagaggtagttctgacttccatttgcttctgctctccactctgcaaaaaccctggctattatttgaaatatggagacgaaaaaagatattggaagagcatacattaaataatagtccattaaccttccacacatggttggcaacatctagatccaacaatgttcactgaacattttgagatgtgggaagttgaggaagttgtctccaagaggaagtcatcaggaactcccatacttcctatgtgggaacacagggaaagaggcattttttcctgaagtctctgtgttccagtgctatccctgaatgtctattcccagctctcgcttagctgtttcaatgacaagatatagcacttgaaaattttataaagtgagagtcatatttgctccctgctgcaagcccccaccctgccattccaggaccctgctatggtccacaattggcattatgattccctctattttgcagctatgaaaagtgaggcccaagaaggttaattgacttggctaagattattcacaggctaaatactgagattaatgatttgcaaactacagatttgacagaagtcctaatgctatctctacatcctatttctgttgaggaccaaaattgactgttgcattgcctttgatttcctttgaccatccttcattacagatttcagtaatttttatggtccaaagctaggtgacagatattacatcatatgcatttgttaactcaccctatgtctgcatagccttgctatatggtcagaattctccagattgactggggaacttggagttaaagagcccctgaccccctaaaaaattatagaaaatgaaagaagctgtcaagaaagtaaggagcagagataagagcagagatgggagygtgcctctgcccggcagagactcacaacatgaggcaagacagatcttagctgaacttcttgcaggatgtatgcctcaatgaaaggaatggagcacgggcagcatccggcttaggctggagccccttcaaccatcatggctgttttagcagggtgtttgccagctgcttacaaatcccaagccaacagacatggtttcaggacctgaatcatgcaaacatattttctgaaaggttctatcacctgagaattgcttttccttcgctccttgtttttgaaccaaaaagccgaccaaatgtatagtggcaaacacttgctcagcacccatccatgcaaggcactgttttaccaccaggctgcatcagttagagaaccaagccgtctctcaccttgcagcttcttcacactttgctcattttctctctaacactgatggtttctgtttcctgctattcagttacagcatctgggaagagagtggcagagaacgccaggcaactgcaccctgccacagtgggtcaagcggaggctgggtggtgacacccgtctctacccagcagaagtcagtggttcatgggtggagaacaaagctcaggacagctgctgcagtccagggaactgtccaccatagaagactcttgggaagcagcccctgaccccaaccccctgtgctttttgaagccgtgtctggtatcacatggaattatgcagtagtcatagaatatctttgaaaacttatattctaaaaataattgctgagatcagcgattaaaatatctaataaatggactggaaaagttgaaaacaagcaaaggtgagagaaaacaattgaggaaaactgggagaaagtgaaggaagttggaccctttgtactacagcatccaaggacagtgatgatatcttctgttccccacaggacccaggttcctgggtgcttaacgtaacacataaggcccttaaggatctaatcaaactaaatcatccccaactcctcccatcaaccccacatagatatccctgtgcctcagctaaatgctgcctttacaccttgcctttacatctctctgcctggaaaacagctcatccctcttgatccagtttaaatacacctttgtctggaaagcctttcccattagtattttatacacaaccctataataaatatttcccctaatatgttgtattttttaaaaaaattctttctctcactagattgtgagatttttaatttttatttttttagacagtctcactctgtcacctaggctgaaatacagtggcgcaatgttggctcactgcaatctctgcctcctgagttcaagtgattctcctgcctcagcctcctgagtagctgggattacaggcatgcatcaccacgtccagctaatttttgtaattttttagtagagatggggtttcgctatgttggccaggctggtctcgaatcctgacctcaggtgatccgcccaccttggcctaccaaagtgctaggattacaggcgtgagcsaccacgcctggcctagatagtgcaatttttaaacatcaatgtattcctttttgcctgctagtaaggaattaagtccggatattaacatttgactattctttcccctctaacaccaactcttctcaaaatgtggtccttgagctgacattaacgtcaactaggatcttgttagattataatctagccccagaccaaggctccaggaaaagactctctaggggtggaccctagaacctgtgttttaacaaggactccaggtgataagtatgctccataaagtttgagaaacactgttcaagacatcatggaggtgtttttctatttctgttttttttaagaagcaagttaataatctcaaccacctttctaatgtatttcatttaatcaaagggatacttgttgctacaggagttacaacagatgacctagtgagggccacaggcagtctgaggaacagtaggatcccatgtttggccaatgtctatcaagcaagaaaggaatagtgaagccagctattagctcccttcagcagaggaaacctgggattaggagtcgccatcaggcatcatggcatcacaagcaggcatgggttraagatttaaatgttgcaaaaagagagaagaaccagaaggaaattacgtccacattatccctgcaagaccattaatgtaatgaacagaaatcaaacaccttttcagtcttcaagtgccgcattcaggttcactctgctaatcacacagctgagtggccctctgctttcataactgggtgaaaccacacatcccaccccaagatggcttgggatctaccatcacaaggggccaccaaagggccaaataacacaaccccgaaattcagtggtggtaactctccatggggttaactttgattactgggaaactagaaatgggaaggagccagtaaattaatttcttctctcccaagactattctgaggcatagcctcccccttgaagcccatcaggatgatcctgcagttccatgtcagcaagagcgccctaccaagtgacctgcagtgtctcttggctgctccttgtgagtcagtagccagcagagaaatgttttccctactttcctttatttctttgttcttacttgcttcattttgccttgacctttttttcctcacccctactacccaaaggcatgtacttcccaaataaagtctgtcactctgatccctccctcagactgtttccagggatgctgagcaccctgtacattcagaaaagcagatgtcaaatttctgtatatatattggagtgcactaagtatttaaaatcaacctttggctattagaggtagggactgtgccttatgcatcattgtttttccagggcttagttcagtgtctgccatatagcaagtattcatttaacaggaaaagagaaagacaagtgggtaagtaattgcctgaatgaatgaggttgatggtgaagaatgggtgggaagggcatgaattggcctagaatagattagacattaagtaagcaggagtcgagacagttaaggggccaaaggcagctgaaaagaatatggaacaggaatacaagttgaaggaatcaggcattctccctagaaacaaagggtacgggaagggtaagagacagacacttcactgtctgggaattttcatccatactcgttattaaagacacacttggttgcctacttaattattaccaaccctccacccccactttattcctggcatacataagtgggattttgttcaggtcgtgtgaagtcaagtcttccagggagatccagcctctcctcagttctgtaggctaattctgagccttttatggtaattcctctacccttgccagtgattaggttaggacaggcttgccgtgctgcaatagtagacagtgagacacaggttgacttctgggaaaatatccccaactcttacaaagaaaagagagaacagaacattttttcttcggggctttggaaattattttcaaagatgtcatggttaggctattatcttgaggccacgaaaggaactatctgaatacacagacaacatactgaaaatggcaaagcagaagttagatagcacatgagtctttgaagatgtgtttgagctgctgaactaatcagccctactttgaaacttattaagataataactagttattatttaagccattttagttgaacctgctattatttgcccctgaaacaatcctaactaatatactgttagtccatttgtatcgttataaaggaatacctgatgctgggtaatttataaagaaaggaggtttatttggctcagagttcttcaggctgtacaggaagcatgcacggctctacagctgcctggcttctggtgaggcctcaggaagctttaactcatggcagaaacaaggggagctggcgtatcacatagtgggaggaggtggcaagtaggcagggaggaggtgccatgctgttaaacaaccagctccttcatgaatagagtgaaaacttatacattactgcaaggacagcaccaagtggatcatgaaggatcgtgacccaaacacttcccaataggccccaccttgaatattgggggatcaatttcaacatgagacttggagaatacaaatatccaaactatatcatacacccactctttgttccaacaatgtgctggtgagtctgggctgggartgggggagaaaggtacctggcacagtggaaatgttggaaatttgaccccaaattagctgggtgaccttaggcatgttaattcatctctactttctttcattttaaataggggaattataatattggaatcttctctacattcttcacagtattagagcaaatgaatttataaatgtaaactcagtgtaaactttagataaaatttttcaaacactaagcttgtgacccagagtagataataaagtcaaaagatggttgccatgagcactaaccgtgaattaaaatagaatagagaatatcactgtgtgctgcacataagtttcattttctgaaattgcttcatttacatgcatgcatgggtgcacttgtgtgcttgcacacacatgcaaatgttgccaagtaaactatttttaaaagcatacgaagcatggatttagaacaaagtcaacaccagagacaactagaggaacctaagtctctcaccaacccccacccctgccaatttacctgtcatccatgattcaaaaatggtttctaaagggaaataaaaattgattcaaaagggagacctaatgagtaacataatagggagccattgattgttttagagtggtatgacggagcagtgggtaagtagatcactcaacactggtatttcagactgccaagagaggagaaaacagacacaaagtgatttctgggcttttgacaactttttttttctcaaagtagattgacaatattatgtgtcatcttatatatattaatagacaaaggcaatatctacacttgggaatacttcatggaaggcttggctggaaactaaaaactggactataaacttcttgggggttagatacgtatcttaagacttccttgtgtcttgaattgtgcctagcctagtgctgcatagatatgtaagccactcattcttgtgcaattacctattgtagaattttcagactaatatatttccttttccttgttttgatcctctgctgaatcatgagaatagttctcaggtgaacagcagtgatgtacagtgtctcactggaaaagcaggaaaataatcagatgtaccccagaaccttaggatatgggaggctcttctactggccactccatgggaaactcgcttgctttgggggacagtttgctttgctctattttgtgggcacagggttttgccttatttttctactcccttattcccagcaaacatcctaaaaagatgtgggtaaaagaaaaagagaataaattttgcaattctactcactggctagaaacagacagagacacatgagtagaggcggagtttaccatcacccttaatcatcctggggcccatgtgtgtataaaaggcaagaaaagagccattaccaggaggcactcaccttcacagtttccaccgcataattccacccctctgtatcaaactacccaaattgctacaccaatcacaactgccctcttgttcaaagaaaataatatcatggatttctttcctggcagttctgctattgattgtttttgttcttttaataagcaaggtgagaaggttagaaaaaaattattcagataattcacctgggagtagggtaggaacttgaggcatgcagagagaatggcaaattcaaaatcaactaagccataactgcctatcctactgaccactgtgccaggtacctcaaaagagtaggacttgattcttccttttgaggaggtttcagtttggttggaaaggaatgggggaggggccaagtacagtggctcacacctgtaatagcagcactttgggaggccgaggtgggtgaattgcttgagcccaggcatttgaaaccagcctgggcaacatggcaagaccccacatctacaaaaaatacaaaaattagctaagcatgatggtgtgcacctgtagtcccagctactcgggaggatgaggtgggagaatcacttgagcccaggaggttgaggctacagtgagctgtgaacatgcttctgtgctccagtctggactacagagcaagactctgcctcagataataaaaaaataaaaaaggaaaaaaaaaaaagaaatggggaatggaagaggaaggaatccaggggaagaatgatcactaagactgcatcacaccttttgctatctcatttcaactctacatcaacccaatattcccttcatttaacagagaggtcaaaagaggctggaaggataaggttgtccagtaaaaatgtcaaggctgatatgggaacatagccagtttgtctctaaagtgccctgtgtcccttggggaagagaatatttaacttgattgttgcttcagttttttattctatgtcagctatcagtttgcaaggcattatttaggggatttcctttactttctttttttttaaatctcaaatttccctctcatttagtaactgtaatttcagtgcctaacatgtaggacaaaatactttccatatttttttttcaaaatttttgcactgactgtagtcccctcactggaacagctttatttccctaaataatatacaatgaacttgttcatatcgaagacgtatgccaatattaaatacaaacagctcagctgggcgtggtggctcatgcctgtaatcccagcactttgggagactgaggcaggtggatcacctgaggtcaggagttcaagaccagcctggctaacatggagaaaccctgtctctaataaaaatacaaaaattacccaggtgtggtggcacatgcctgtaatcccagctactcaggaggctgaggcaggagaatcacttgaacccaggaggtggaggctgcagtgatccgagattgtgccactgcactccagcctgggtgacagagcaagactctatctcaaaaaaaaaaaaaaaaaaaaaaaaggtggctgaccagatggccaaaaggaacagctccagtctgcagctcccagcaagatcaatgcaaaaggtgggtgatttttgcatttccaactgaggtacccagcttatctcattgggactggttagacagtgggtgcagcgcatggagggcgagccgaaggagggtgggccattgcctcacccaggaagtgcaaggggtcaaggaattccctcccctagccaagggaagccatgtgggactgtgccttgaagaacagtrcacttcggcccagactacacttttcccacagtcttcgcaacccacagaccaggaagttcccttgggtgactatgccaccagggccctgggtatcaagcacaaaactgggcagctgtttgggcagacaccaagctagctgcaagagtatttttcataccccagtggcacctggaatgccagcgagacagaacagttcattcccctggaaagggggctgaagccagggatccaagtggtctagctcagcggaccccaaccccacagagcccagcaagctaagattcactggcttgaaattctcactgccaccacagcagtctgaagtcaacctggggcactcgggcttggtggggggaggggtgtctgccattactgaagcttgagtagactgttttcccctcacagtgtaaacaaagccaaggggaagttccaacttggtggatccctccgcagctcagcaaagccattgaagccagactgcctctctagattgctcctctctgagcaggacatctctgaaaaaaaaggcagcagccccagtcagggacttatagataaaaacccccatctccctgggacagagcacccaggggaagcagcggtgggcacagcttcagcagacttaaacatccctgcctgctgggtctgaagagagcagcagatctcccaggacagcgttcaagctctgttaagggtcagactgcctcctcaagtgggtccctaacccccattgtagcctgactgggagacaccacccagcaagggttgacagacacctcatagaggagacctctcgctggcatctggcgggtgaccctcagggacaaagcttccagaggaaggagcaggcagcaatttttgctgttctgcagcctccgctggtgatataggtaaacagggtctggagtgggcctccagcaaactccagcagacctgcagaagaggggcctgactgttagaagcaaaactaacaaacagaaaggaacagcaatgacatcaaccaaaaggatgtccacacaaaaactccattcgaagcttaccaacatcaaagacccaaggtagataaatccatgaagatgagaaaaaaatcaatgcacaaaggctgaaaattccaaaaaccagaatgcctcttctcctccaaaggaacagaactcctcaacagcaagggaacaaaactggatggagaatgagtttgacgaattgatagaagtaggctttagaaggtgggtaataacaaactcctctgagctaaaggagcatgttctaacccaatgcaaggaagccaagaacgttgaaaaaaggttagatgaattgctaactggaataaccagtttaaagaagaacataaatgacctgatggagctgaaaaacacagcatgggaactttgtgaagcatatgcaagtatcaatagccaaatagatcaaaccaaagaaaggatatcagagattgaagatcaacttactgaaataaagcatgaagacaagattagagaaaaaagaaggaaaggaaacaaagcctccaagaaatatgagactatgcgaaaagaacaaacctacatttgactggtgtacctaaaagtgatggggagaatggaaccaaaagttggaaaacactcttcaggatattatccaagagaacttccacaacctagcaagtcaggccaacattcaaattcaggaaattcagagaacaccacaaagatactccttgagaagagcaaccctaagacacataatcgtcacattcaccaatgttgaaatgaagaaaaaaatgttaagggcaaccagagagaaaggttaggttacccacaaaggaaagcccatcagactaacagtggatctctctgcagaaaccctacaagacagaagagagtgggggccaatattcaactttcttaaagaaaagaattttcaacccagaatttcatatccagccaaactaagcttcaaaagtgaagaagaaataaaatcctttacagacaagcaaatgctgagagattttgtcaccaccaggcttgccttacaagagctcctaaaggaagcactaaacatggaaaggaaaaaccagtaccagccactgcaaaaacataccaaattgtaaagaccatcaacactatgaagaaactgcatcaacaggcaaaataaccagctagcatcataatgacagaatcaaattcacacataacaatattaaccttacatgtaaatggactaaatgccccaattaaaagaaacagactggcaaattagatagagtcaagaagcaacggtgtgctgtattcaggagaccgatctcacgtgcaaagacacacatagactcaaaataaaggattggaggaatatttaccaagtaaatggaaagcaaaaaaagcaggggttgcaatcctaatatctgataaaacagactttaaaccaacaaagatcaaaaaagacaaagaagggctttacataatggtaaagggattgatgcaacaaaaagagctaactatgctaactctcctaaatatatatgcacccaatacaggaccacccagattcaaaaggcaagttattagagacccacaaagagacttcaactcccatacaataatagtgggagactttaacgacccactgtcaatattagacagatcaatgggacagaaaattaataaggatattcaggacttgaactcagttctggaccaagcagacctaatagacatctacagaactctccaccccaaattcatagaatatacattcttctcagcaccacatcacacttatyctaaaattgaccaacagaattggaagtaaaatactcctcagcaaatgcaaaagaatggaaatcataacaaacagtatctcaaaccacagtgcatcaaattagaactcaggattaagaaactgacccaaaactgcacaactacatggaaattgaacaacctactcctgaatgactactgggtaaataataaaattaaggcagaaaataagttctttgaaaccaatgagaacaaaggcacaacataccagaatctctggtacatacccaaaatagtgtttaaagggaaatttatagcactgaatggccacaagagaaagcaggaaagatctaaaatcgacaccctaacatcacaatgaaaagaactagagaagcgagagcaaacacattcaaaagctaacagaagacaagaaataactaagatcagagcagaactgaagtaaacggagacacgaaaaatccttcaaaaaaaaaaaatcaatgaacccacgagctggttttttgaaaagatcaacaaaatagaccactagccagactaataaagaagaaaacagagaagaatcaaatagacacaataaaaaatgataaaggggatatcaccactggtcccacagaaatataaactaccatcagagaatactataaacacctctctgcaaataaattagaaaatctaaaagaaatggataaattcctggacacatacatacaccctcccaaatctaaatcaggaagaagttgaatccctgaagagaccaataacaagttctgaaattgagacagcaattaatagcctaccaaccagaaaaagtccaggaccaaacagattcacaacagaattctacttgaggtacaaagagctggtaccattccttctgaaactattccaaacaatagaaaaagagggactcctacctaactcaatttatgaggccagcatcttcctgataccacaacctggcagagacacacacacacacacaaaagaaaatttcaggccaatatccctggtgaacattgatgcgaaaatcctcaataaaatactggcaaaccaaatccagcagcacatcaaaaaccttatccaccatgatcaagtaggcttcatctctgggatgcaaggctagttcaacatatgcaaatcaataaacataatccatcatataaacagaaccaatgacaaaaaccgcatgattatctcaacagatgcagaaaaagccttcgataaaattcaacaccccttcacgctaaaaactctcaataaactaggtattgatggaaggtatctcaaaataataagagctatttatgacaaacccacagccaatgtcatactgaatgggcaaaagctggaagctttccctttgaaaaccagaacaagacaaggataccctctctctctattcctattcaacacagtattggaagttctggccagggcaatcaggcaagagaaagaaataaagggtattcagataggaagagaggaagtcatattgtctctgtttgcagatgacatgattgtatatttagaaaactcatcatctcagcccaaaatctccttaagctgataagcaacttcagcaaagtctcaggatacaaaatcaatgtgcaaaaatcacaaacatccctatacaccagtaacagacaaacagccaaatcatgtgtgaactctcattcataattgctacgaagagaataaaatacctaggaatacaacttacaagggatgtgaaggacctcctcaaggagaactacaaaccactgctcaaggaaataagagaggacacaaatggaaaagcattccatrctcatggataggacgaatcaatatcatgaaaatggcaaaatggccatactgcccaaagttatttatagattcaatgctatccccatcaagctaccgttgactttcttcacagaattagaaaaaactactttaaacttcatatggaaccaaaaaagagtctgtatagccaagaaaatcctaagcaaaaaaaattaaagctggaggcatcacattacctgacttcaaactatactacaaggctacagtaacaaatatagcatgatactggtaccaaaacagagatatagaccaatggaacagaacagaggcctcagaaatcacaccacccatctacaaccatctgatctttcacaaacctgagaaaaacaagcaatggggaaaggattccctatttaataaatggtgttaggaaaactggctagtcatatgcagaaaactgaaaatggacaccttccttataccttatgcaaaaattaactcaggatggattaaagacttaaatgtaagacctaaaaccataaaaactctagaagaaaacctaggcaataccattcaggacataggcatgggcaaagatttcatgactaaaacaccaaaagcaatggcaacaaaagccaaaatttacaaatgggatctaattaaactaaagagcttctgcacagcaaaagaaactatcatcagagtgaacaggcaacctacagtgggagaaaagttttgcaatctattcacctgacaaagggctactatccagaatctacaaagaaattaaacaagtttgcaaggtaaaaaacaacctcatcaaaaagtgggtgaaggataaaaacagacacttctcaaagaagacatttatggagccaacaaacatatgaaaaaaagctcttcatcactggtcattagagaaatgcaaatcaaaaccacaacgagataccatctcatgccagttagaataatgatcattaaaaagtcaggaaacaacagatgctggagaggatgtggagaaacaggaacacttttacactgttggtgggagtgtaaattagttaaaccattgtgcaagacagtgtggcaattcctcaaggatctagaacaagaaataccatttgacccagcaatcccataactgggtatatacccaaaggattataaatcattcaactataaagacacatgcacacgtatgtttattgcagcactgttcacaatagcaaagacttggaaccaacacaaatgcccaccaaggatagactggataaagaaaatgtggcacatatacaccatggaatactatgcagccataaaaaggatgagttcatgtcctttgcagggacatggatgaagctggaaaccatcattctcagcaaacacaagaacagaaaaccaaacactgcatattctcactcatatgtgggagttgaacaatgagaacacatggacacagggaggggaacatcacacactggggactgtcgaggggtggggggctgtgggagggatagcattaaggagaaatacctaatatagatgatgggttgatgtgtgtagcaaaccaccatggcatgtgtatacctatgtaacaaacctgcacgttctgcacatgtatctcagaacttaaagtataataaaaactcaaacagctctacattgttatttatttaaaacttcaatttacttgctaagaattatcttttttttttcattctctcttcacttctctcaccagcaatggcatttgggtttttttaaggccactttaaaagacattgaaaataatacctgtttgttttcattctattattcttattacattcatttgtctttgaatgttcccaagttttctggtatgacactacgaatctaagttattccagacttctctattctttcatgtatttagaatacatttttcaaaattcctaggctgaggtattaataacttgcccaaattacctttcaaaatgtatttaccatccctgtattactcagtacaaaaatttgattttttggagacatatttgtacatatttatgggatacatgtagtattttgttacatgcacagaacatgtaatgatcaagtcaggctatttgggctattcatcacctccattattgattatacctatatgttgagaacatcttaagtcctcttttatagtaagtttgaaacatataatactatactatagtcaccctactctgttattgcatattagaattttttccttctgtgtgtttgtacccattaaccaacctctacttcattcaccccccaccacccacacacccttccaatcctctggtgtctatcattctattctctacttccataagatccacttttttagctcttacatatgagtgagaacatgtgatattcttctttctgtgactggcttatgtcacttaagataatgacccttcagttctatccaagttgctgtaaatgccatcatgttagtcttgtttatggctgaatagtattccattgtgtatatatatatattctttaaccattcatccatgatggatacttacgttgattccttatctttgcaattgtgaatggtgctgcaataaacatgggctgcaggtattcctttgatatattaatttcctttcctttggataaatactagttagattactggactgtatggtagctgtttttagttttttgagaaatctccatactgttttccaaaatggctgtactagtttacattcccaccaactcccaccaacaagaattcccttttttctgcatcctcaccagcatctatatttcgtcttcatcttctccttctccttctttgacagggtcttgctctgttgcctgtttcccaggctgaagaacagtggtgattcacaggtgcaatcaggatgcactgcagccttgaactcctagccttaagcaatactcctgcctcagcctcatgcgtagctgagactacaggcatcagacttttgtctttttagtaatagtcattttaactggagtatgatgctatctcattgtgattttaatttgcagtttcccgatgattactgatgttgagcattttttaatatgcccatttgtctttttttgagaaatatctattcatgtcctttgcccatttttcttcttaggcagagtctcattctgttgctcaaactggagtgcagtggtgaaatcgtggctcacagcaacttctgcctcctaggctcaagcaattctcctgcctcccctccccagtggctgggattacaggcgcccaccaccatgcccagctaatttttgtattttagtagagacggggtttcaccatgttggccaggctggtctcaaacttctggtttcaagtgatccacctgcctcagcctcccacagtgctgggattacaggtgtaagccactgcacctggccctttacccactttttagtaggatgatttgtggtcttttactgttgagttgtttgagttccttgtatattctggatactagtcccttgttggataaatatcttgtaaatattttctcccattcaacaagctgtatcttcagtctgttggtttcttgtgtagaagaatttttagtttaatatagtcccatttgtctatttttctttttggtgcctgtgatctagagatcttagctataaaatctttggtcagactgatgtcctgaattgttttccctatgttttcttgtagtagttcataattttgggtcttatgtttaagtccttaactgatttgagttgatttttgtacagggtgagagatgggtccagtttcattcttctgcatatggatatccagttttttctattccatttagtgaagaaagtgtcctttcctcagtgtatatacttggcacctttatagaaaatcagttggtggtaaatgtggtatatgctggcatcagtgttagtgtgtccaggcgggctgatctgggggcttccagtcagcttgctgaggtgctggcaatggcagctgtgggccaggtggatgggcaggtccataggccctgggcatcaggcatggtgtgggtgatggcagttgcagtggcaggacaatcctctggtacccaagtagtcccaactgattttcaaggtggctgcaggccatttcccaggcccacaggtggttcatgtctgtgggtggggggtgtatgctggctgtgatggtagtggcaggttgggtgaacccatctccaggccttcaggatgagtgctcaggcgccaacaggaatagatggggctgagcaatccccaggcccctgcatgggcactagggagaagggagacagaggtgagcctcaggccccccgatggtatatataggcactagctatggtaggcaggggcatggtgatttccaggccctcagtggaatgcttggatgggaggaccagcagctacaccctagccatgttgctggggttgctttcattggcagaagccttaggagggccactgggagcacacactttggccccaggtggtagttgctggtggggtagcctgttctcagggtgcttctaaatgtacggtaccctgctgatggggatggtgggtagcttccagtggcccccacattggatatggaggcagcagccagcagcagcagggtctgcgttagggggaggtcaatggggctcaaggaatctggagttgcaaggtctgtggggtcccagggtaggatgcagtctgctgggctttcaaaatggtaccttgctggagtgccttaagagtggggtaagagggagggtgggtggggtgacccagtgtgagctccccatatgaagcaatgccatcatggggtctccagccagtgccctatgtcctagcaattcattctttgcgctcctggcattctcaaatgttttgtagatgccttcttgtagcagccagtctcgtcccttttcttgaagtcaatgagcatcaaatgtgttcaggattcatgaaataattctgacaataattagtattttttataggaattggaacatggtttattgcagtataccgcagtgtttgtcagctctagaacttacgaagaagaggaagaggagaacaagtttgactcctgtgaacgtttttccttttttctcagggcttgtgtgggtcaaaggactctccagtggctaggattgcaggagtccatggtaggaaggtgggccactgggggctactcacctactctttcctcacattagggagccccctccagactccctgctaatcccagctgagcaggctacttcactttcctcttgtttttcatgctaggtgtcacttccgtgttgaattccagccttctctcttaggtgatctatttttattttacaagttagaaatataagtgcagagaagttaaaacagcaaatctgtggcttccaagagtggcaaagcagtttctagcctatgttggctgagttttgaccaagcctctgatatgcatacacatatatacatgttcatgtacgtgtacttaaaacatttttattcccatgtttaaggctagttgaataggggtgaacacagaaaatcctagcaattcattctttgcactcctggcattctcaaatgttttgtagatgccttcttgtagcagccagtctcgtcccttttcttgaagtcaatgagcatcaaatgtgttcaggattcatgaaataattctgacaataattagtattttttataggaattggaacatggtttattgcagtataccccagtgtttgtcagctctagaacttacgaagaagaggaagaggagaacaagtttgactcctgtgaacattttccttttttctataatttacgcatatgctaacaagcagctagtttcaaaacacaaacttaccttgacaggaactaggtctcactgttgagaatgtagtctcctctctccccacatagccctagggttattcaggatgaaggagaagaaaaaacatacccaagagcattttataattccatccttccttcttgttatgctaaggttactagtaccatgacctatgtgaactcgttttcttgaataagaagaataaaagcgttccgtccatcaaggaagacctcaagagaaattccaggttcaggtctcatggtacaagagccaagtgtttcttcctgaatcattcccaggcctgcttttgatctgagcagtggctttcaaaaaatatgctgatgagattgctctctcacttaagaacttaagaaagagttgaagttcttcaatgtatatccccagcctgaaacttgtcttgaggaagatttgtagtagtaatgaagggtgacagtaacctaagggtgaagaatgtagagagatttttcccaagagcaatccaagatactgcttgaaacatccggggtccactgacatgccccttggactccaggagaaatctggaaatgtctggacctgcaatgagacacacccagcttcaaatgtgtcactctgggcatattctttaatctgagctccaattttctttcttgtaagagtcattacacatggctgttttatttactaattcgttttttaaattaaagaaataaatttgtaggagtaatatagttacattgtttacaagtcaaattcttacatggctcatttccatccatttcatggatgtgttaccttctggtatttattagaatttgctttagactttctgttgctcacctcacagttcttgtgtcatcttagtttcttttctgttttttggtcttttatgcgagaggttttcctcacattgtctgataatccttggcagtcagttcgtattgaagagttagacattagaaagccaagtgaaaatcctgtgtgtgtacaaggtttgttgactggaaagcttcatggggatattcttgcttggacatttcactgaaggacatccaaaaacctgttgccgtttttagattttttttcttggattgttggttttcctggtgatcttactccaatctctttggtgccataattctaccagctgagtatgagaaggagctggggtttctcaatgcagaatatgtacttggttctaatatggtagtctggttctaatattgtagcctttttctcagcaatggttgccacatctgagtcctgaatccctttggaatcagcctctccagagggtgtatgtttagaaccggcgtgagtgaaaggtagtcatccaatgacatgaggtgggtgaaaatattttaactgctttatttataaattttcaactgaccctcctgtttttgaaacccaccagtgtccccacttccataagtccctggatcctcaattttccaagtcttcctggaattctatggagtaaattagcttactgatgcatttcccttacttgccttaggtttctgctcactctgttcccaagtcaattatgacctacctggctgcttccagtttctgaaatgttgtgtgtcagcttcttttccattgcctttgtccttgcaagcttatgccattttaaaaaattcttttgctgtcgtttttgtggagaaatagaaaaatatgtacattcaatccccatgtttaagtggaagtccctcataaaattatattagaaatttattagaaatatatacacacatatgaatatagatagatatacactctcttttttagcatacatagtgcctgttatttagcaggtactaaaaaataatatgtatatgtatatacatgtagcagaaggctaacaggaacttagatacactcaggaatatatgatagcatggaaggttggaacggtgggcctgtgcacaatcaagtcatgaggacttagaaaaagacggaaccatggctgggtgcggaggctcatacctgtaatcccagcactttgggaggccgaggccagtggattacctgaggtcaggagttcaggaccagcttggccaacatggtaaaactctgtctcttaaaaaaaaaaaaaaaaaaaaaaaaaaatacaaaaattagccaggcatagtggcaggcgcctgtaatcccatctactcgggaggctgaggcggaggttgctgtgagccaagatcgcgccattgcagtccagcctgggcaacaagagcaaaactcagtctaaaaaaaaaaaaaaaaaaaaaagaaagaaagaaaagagaaaaagaaaaagagaacctggcaggattcagtaattaagccagagtcagaaggagaagtacttctcaatacagcatggtatcttctgttttttagacacggctctacccagctcaattgattcatgactgtgtgggtgtattttgttttgttttttctttttcagactttgtcaacaggaagtaggtgcccatgttgttgatagaaaagtttgtaagtaggactgcacagacttggttttggttcagcatttggcaataatcagtctttctgcttcagccttcagagagcccacttcatcattctttctggcatccctgtgatcatatgattacatatctaatcagtgtaacaacaacagctacttaaagaaggcatgccattaaagatattgttaatatctctacattgcctttcaaacatatgtaagcattctaacttggagtgaaatcttcttaggtgctttatatgttgaaattctaccagtcagctgaggaagaaatgtatacggcttatccccaaaataagatattccaacaaataatgtttatgagagctgttaatttatgttaaaaaaaaaagctattaataaaatgtttaagtaattaaatttgggagcttgattggcagtaggaatattaagaggattagctagataactaatgtagaaaataatataattgtattgagtcaacaaaagcttatatagatttaattactatgatgatattagattacttcataattagaatctttgtagaattgttttggtataattgcattcacaatactcaaaaagtaagcttaaagaatgatatttttaattatttaattccagtaagtcataagtcttattttttgcattatatgaggctgaattaaaagcagaatgccatctgacatttcaaaatttcatggagagaaatgtatctgaaatcatatacaccaaaaagataagtaaaatttgatagaaaaaaatgaatgtattttagctgagttctgacatgcattttattcacaaatcaaacttcagaacacagaagacaatttcttattttgaatttatagagactattctaatattaaattgatttttacaagctagcaaatattttcaatagttgaagcttcggagtttctcatttatctaagctatgtaaatgcatgcaaagtttcttctagaaaacaaattactgaaagacattttcctgatttgtatttggctgtgttattccccagaaggtgaaattattaaacatgccattcgaaagccagtaactccttagtacaggttgaacatccctaatctgaaaatctgaaatctgaaatgctccaaaatctgaaactttttcaatgccaacatgatgccacaagtagaaaattttacacctgatctcatgtgatgggtaccaatcaaaactttgcttcatgaacaaaactattttaaaatatgtataaaattatcttcaggctatttgttaggaaataaaaataaaactctaagtccctccgactgacccagcggattctctcttggccaagggaaccccagcaaaaccttggaagctgaattcatggctatgatgggatgggagatttggcatatgcctcattatatccccaccctcgctaacagtcgttaggttttcttccttaacagctaaacagaaaccagcctttccaaaagactactagcttatcttcccagatacgtaacagtccagatgagattcattatgttcaccttattttatgtaagatgtagatttaccaggcactaactaaagttttacaagtatgtaatcatttgtctcactgctgccccaccacctcccctgccttttaaggaaaatatataaatactaaacctcctaagaacctctttggaaaaaacagtcacacatgcttctgtgactctctattttcccaggtatgccttcaagctggctcaacaaagcttgatgctttgaaacttatgcttcaattactcatttcagttgtcagtgtaaaaggtgtatatgaaatagaaaagaattctgtgtttagacagttctcatcagtgagatatctcattgtgtatatcccaaaatatttcaaaaaaatgaaatccaaaacacttccagttccaagcatttaggacaagggatattcaatctgtatcagaaacatgcgatggtgaccacaaaaggaatctggcagctgaaaattctgagtcactatcatgtcaaactataaaaattttatacaacttaaaaaaaaaacctgcactaatcattaatttatattattgttaaaattatcatacagtaaaattgattttttttccttttgatgtacagttctgaaaccacctttgcaaaaattgcaacactgagaaaactttgacagtgaaagaaatttgacctaaccaactccacattgcctttaacctccaaactgcccttcattcctgggcatggcctaagctaactttgggagaaatttaggttatagtttaaatgataatagctctttccaaaactaaactgcctttgtaaaactaatgaaaggccaccagtttacgaagataggagggcctgaattctgctaagatataggcatagttaagtgattaccagccattattccagaggtcacaagattttcaacttcctcaattactcctgtaaataacgttactattgtagaacctaaaattactattgtagaacctaaagttgaccttttgagatgtcttgtcaggcttttgcatttctgatgacmccagtgtcctgaaccagtgactcctctgtggacccttactggaagctgactcagggcacacgaggaccattttccacacccatatgattgcatccccaaccaatcagcagcacccattcctttgcccaccaaattactcttgaaaaactctagcctccaaattttcagggaggctgatttgggtaataataaaactctggtctcctgtttagctggctctatttgtattaaactctttctctactgcaattgccctatcttgataaatcagctttatctgagcagcaggcaagaagaacccattagacagttacagttctgtaaattttaacacaaacattgttcatgtaaccaccagtaggatcaccatctggatcagtttcaccacctaaaaagcttcctcataataccctactccatgacactaggaacagctactagttctccatcccaattgtttcatcttttgagaagtttatataaatggaattgtatagtataatcatcaattttaaaataaaatttcagatgtattcacattccataagtgtactctatgatgctgatatttatctttagcctcagcttatgccaaactatgcctttccatatatggccaaaatgtgtattcaatatacctctaactgggaggatcaattgaaagtgttgttttactaaactctataacacaaaggaattcaaggataccatagggatcattcaactgattataacacaaaatggggagagccaatttccctgtccccagagacctctgggcagctctagctccctgagggasscagcacaacagtggtccctttctcaggagatacctgggacaccaggcagttcctcttagaccttctgggagaggggttcccagcagacgctggataggagcaatagcactgagaaggggtagcagaagcagcagtggccttgacttgtgtatgtgcacatatgcaaggagcccttgcgagactcccttctccccaggtagtagggtcttgcttgccttgctagtggcaagaaccactaaagtttagttgttactgttaacgtaaccctatttctacttacaatgtggtgaggccttggaaaacccaagttatataaacatttgtcttagttcatttaggctgctttaacaaaaataccataaactgggtggtttataaacaacgaacatttatttctcacagttctggaggctgagaagtccgagatcatgctgccagcagattcactgtctggtgtggtcccatccctacacagtgaaagcagcaaggtcactttctgtgcctgatttataaggacactaatcccgatcatgaggactcaaccctcatgacctaatcacctatcaaaaagccccatcaccttagggtttaggatttcaaaatatgaattttgggtagacacaaacattcagactgcagcaacattcaatagaggcaactcacctaccaggaggcaacttttcattctgatgcccaggtatgacagacctcaaatctgttaccgtcccatgaaccaggaattatacaaagggtagaggggcatagctctgggtgaagagctgcactctgttcactctgggctctgtgtggtggtgtcccaggtagtgtcagtccagctgttaagtccagtgaggctcagaaaggtgatgtcatttgttcaaatcttccagctagtttgttggtcagatcataaccagaccctatgaagtctaatcatacccagttctgtaggctttcctcttcaataggtccattcttatctctaactgagaccacctgcatcctcatagcttaactatcagtatggaaaacaaaccatctgtgtcactatgactttactatttgttcaagaaaattcttgtccaggaagataagacggtgtacaataaataacatcaatgtttacttcagaaaatttctgaaaaccaatttattcagatgatagattgctcatttgaaaaaataaaccccttttcaggacaacagattcctctccaagtctaataacttgtttatcaaagatctatttttcaggacttcaagaccctcttatcacaatgtccaccaattctaaactataatatcatgaactttgccgaatttccaccagatttcttccttgaaaggcctgactttaaaccacttgagctcagacccttaatgtttataaatatctacctgtgacctctcccttttgagaattataaggactttttcaaggtgttgcactctcttactgcaggttaataaacttagctttgtttgatcaatagtttattctgatggtcttctttgaaagtcagcaatcaacagttctggggcctcagtaggattcactcaataatttctgctcctgcagtttaagaaccttagccctaaacagtgtgttcttctgaagtttgccatttggaagcctcccccactgcagtgttaaggtaagtctctcattggatttgagtcccggtgtcctttccataaagctcttaaattgtttatttttcttcctagaaataagaaacttttaagaaattcctggattatctgatcagatttgaaaatgtttattctttgtggaaatgttttattactagtaacattactctttttgtcttttatcctatttgttgtgagtctatgagaagaagctcacagggaagaagacagccgtagacctggcaattttgtcctcaaactggctcaaagatacaataatatcagcgggtctcatcaaactggcattcttatagaataaactttgctctgggtcacttactaatatcttacagaaaatttatagcagcagttgtatattgagggtgtgaataaaaaccaccagagaagctttttgaaaaaatactatgaatagatttctgcttctggccaaaatgaagaaacagggaccagatttactctccagtaaaccagtggaaaaaaaaacagacacaatattgaaaaataaaaagatttttcaagacatcaggcaatgaagaatagtgatccaagagaaacaagaaacaagatgaatcttatgttcgccacagcttactgtctggagtgagtatcaagactgtggtacagaaagggaaaacccagatggaaccctgccatctccctaagtggagtctggggagggcaaagtgagtagagtttgcaaggaaagatatgggaaaggagacagctgtgcagagagaacactggggatctgtacagggtcttcagctgagcatgagtcagcatatgcatgtgaggaaactacccatgactggggaaagaatcagctggaatgattacggggtatagaatccagggctcagaatcattcctgtttctataggaaatgggcattgagtagcatacttggaagaatttttgcttcagtcatgcagtaacatagaacttagactaaatactactctgataccacataatgaaactcaaaataagacccaaaagaatcaaactgtttataagtaactgagtttcaaaataaagttcaagaatatttatagaaataccatctaacaaagcacaaaattaagataaagggtcaaactatttgcaagtaattttaagtgtgttctagaacaaagttcaaaagtatttatagaaatacaaaaggatccaaaaactgtccacaaaaatatgacccataatgaagagaaaaatcagtcatttgaaactaacccagaaatgacaaagatgatagaatcggcaaagacattagaagaactgtaattgtacttcgcatgttcaagaagccagaggaaagactgaacatggtaagcagaaacatggaagatataaaaagactaaaaatcaaactttagagatgaaaacattatgtgagatgaaaaacacactgagtagaattaaaggcaaattggaaatttcagaagactagtgactttaagaattgagagataaaaagtacacaaaatgagaaacagaagtgtgtcagtgagttatgggacaacttcaaactaatgcgtaaattgcagtccctgaaggaaatgagggatatgttggaaaaaaatatttgaaaaaataatggccaaaaatctcccaaagtttatgaaaaccacagattcaagaaggtcaacaaattgcttaaaaatagagaaagtctaatattaggatacaaggtcttgaccaggtgtggtggttcatgcctgtaatcccagcactttggaaggccgagtgggaggtgaatcacttgaggtcaggagttcaagaccagcctggccaacatggtgaaagcctgtctctactaaaaacacaaaaattagcccggcgtggtggtgcacactataatcccagctactcgggaggctgagacaggagaatcacttgaacacaggaggtgcaggttgcagtgagccgagatttgtgcattgcactccagccctgggtgacaaagtgagactccgtcttaaaaaagacaaaaacaaaaacaaaaacaaaaaaatggaaataaggtctcaaattaataacttcagcttacaccttaaaaaaaattagaaatatcatt

SEQ ID NO: 2 - protein, 809 aa, Homo sapiens
MEAEGSSAPARAGSGEGSDSAGGATLKAPKHLWRHEQHHQYPLRQPQFRLLHPHHHLPPPPPPSPQPQPQCPLQPPPPPPLPPPPPPPGAARGRYASSGATGRVRHRGYSDTERYLYCRAMDRTSYAVETGHRPGLKKSRMSWPSSFQGLRRFDVDNGTSAGRSPLDPMTSPGSGLILQANFVHSQRRESFLYRSDSDYDLSPKSMSRNSSIASDIHGDDLIVTPFAQVLASLRTVRNNFAALTNLQDRAPSKRSPMCNQPSINKATITEEAYQKLASETLEELDWCLDQLETLQTRHSVSEMASNKFKRMLNRELTHLSEMSRSGNQVSEFISNTFLDKQHEVEIPSPTQKEKEKKKRPMSQISGVKKLMHSSSLTNSSIPRFGVKTEQEDVLAKELEDVNKWGLHVFRIAELSGNRPLTVIMHTIFQERDLLKTFKIPVDTLITYLMTLEDHYHADVAYHNNIHAADVVQSTHVLLSTPALEAVFTDLEILAAIFASAIHDVDHPGVSNQFLINTNSELALMYNDSSVLENHHLAVGFKLLQEENCDIFQNLTKKQRQSLRKMVIDIVLATDMSKHMNLLADLKTMVETKKVTSSGVLLLDNYSDRIQVLQNMVHCADLSNPTKPLQLYRQWTDRIMEEFFRQGDRERERGMEISPMCDKHNASVEKSQVGFIDYIVHPLWETWADLVHPDAQDILDTLEDNREWYQSTIPQSPSPAPDDPEEGRQGQTEKFQFELTLEEDGESDTEKDSGSQVEEDTSCSDSKTLCTQDSESTEIPLDEQVEEEAVGEEEESQPEACVIDDRSPDT

SEQ ID NO: 3 - protein, 150 aa, Homo sapiens
MDRTSYAVETGHRPGLKKSRMSWPSSFQGLRRFDVDNGTSAGRSPLDPMTSPGSGLILQANFVHSQRRESFLYRSDSDYDLSPKSMSRNSSIASDIHGDDLIVTPFAQVLASLRTVRNNFAALTNLQDRAPSKRSPMCNQPSINKATITV

SEQ ID NO: 4 - protein, 745 aa, Homo sapiens
MAQQTSPDTLTVPEVDNPHCPNPWLNEDLVKSLRENLLQHEKSKTARKSVSPKLSPVISPRNSPRLLRRMLLSSNIPKQRRFTVAHTCFDVDNGTSAGRSPLDPMTSPGSGLILQANFVHSQRRESFLYRSDSDYDLSPKSMSRNSSIASDIHGDDLIVTPFAQVLASLRTVRNNFAALTNLQDRAPSKRSPMCNQPSINKATITEEAYQKLASETLEELDWCLDQLETLQTRHSVSEMASNKFKRMLNRELTHLSEMSRSGNQVSEFISNTFLDKQHEVEIPSPTQKEKEKKKRPMSQISGVKKLMHSSSLTNSSIPRFGVKTEQEDVLAKELEDVNKWGLHVFRIAELSGNRPLTVIMHTIFQERDLLKTFKIPVDTLITYLMTLEDHYHADVAYHNNIHAADVVQSTHVLLSTPALEAVFTDLEILAAIFASAIHDVDHPGVSNQFLINTNSELALMYNDSSVLENHHLAVGFKLLQEENCDIFQNLTKKQRQSLRKMVIDIVLATDMSKHMNLLADLKTMVETKKVTSSGVLLLDNYSDRIQVLQNMVHCADLSNPTKPLQLYRQWTDRIMEEFFRQGDRERERGMEISPMCDKHNASVEKSQVGFIDYIVHPLWETWADLVHPDAQDILDTLEDNREWYQSTIPQSPSPAPDDPEEGRQGQTEKFQFELTLEEDGESDTEKDSGSQVEEDTSCSDSKTLCTQDSESTEIPLDEQVEEEAVGEEEESQPEACVIDDRSPDT

SEQ ID NO: 5 - protein, 215 aa, Homo sapiens
MAQQTSPDTLTVPEVDNPHCPNPWLNEDLVKSLRENLLQHEKSKTARKSVSPKLSPVISPRNSPRLLRRMLLSSNIPKQRRFTVAHTCFDVDNGTSAGRSPLDPMTSPGSGLILQANFVHSQRRESFLYRSDSDYDLSPKSMSRNSSIASDIHGDDLIVTPFAQVLASLRTVRNNFAALTNLQDRAPSKRSPMCNQPSINKATITGLYNGIIAFL

SEQ ID NO: 6 - protein, 673 aa, Homo sapiens
MMHVNNFPFRRHSWICFDVDNGTSAGRSPLDPMTSPGSGLILQANFVHSQRRESFLYRSDSDYDLSPKSMSRNSSIASDIHGDDLIVTPFAQVLASLRTVRNNFAALTNLQDRAPSKRSPMCNQPSINKATITEEAYQKLASETLEELDWCLDQLETLQTRHSVSEMASNKFKRMLNRELTHLSEMSRSGNQVSEFISNTFLDKQHEVEIPSPTQKEKEKKKRPMSQISGVKKLMHSSSLTNSSIPRFGVKTEQEDVLAKELEDVNKWGLHVFRIAELSGNRPLTVIMHTIFQERDLLKTFKIPVDTLITYLMTLEDHYHADVAYHNNIHAADVVQSTHVLLSTPALEAVFTDLEILAAIFASAIHDVDHPGVSNQFLINTNSELALMYNDSSVLENHHLAVGFKLLQEENCDIFQNLTKKQRQSLRKMVIDIVLATDMSKHMNLLADLKTMVETKKVTSSGVLLLDNYSDRIQVLQNMVHCADLSNPTKPLQLYRQWTDRIMEEFFRQGDRERERGMEISPMCDKHNASVEKSQVGFIDYIVHPLWETWADLVHPDAQDILDTLEDNREWYQSTIPQSPSPAPDDPEEGRQGQTEKFQFELTLEEDGESDTEKDSGSQVEEDTSCSDSKTLCTQDSESTEIPLDEQVEEEAVGEEEESQPEACVIDDRSPDT

SEQ ID NO: 7 - protein, 15 aa, Homo sapiens
MMHVNNFPFRRHSWI

SEQ ID NO: 8 - protein, 687 aa, Homo sapiens
MAFVWDPLGATVPGPSTRAKSRLRFSKSYSFDVDNGTSAGRSPLDPMTSPGSGLILQANFVHSQRRESFLYRSDSDYDLSPKSMSRNSSIASDIHGDDLIVTPFAQVLASLRTVRNNFAALTNLQDRAPSKRSPMCNQPSINKATITEEAYQKLASETLEELDWCLDQLETLQTRHSVSEMASNKFKRMLNRELTHLSEMSRSGNQVSEFISNTFLDKQHEVEIPSPTQKEKEKKKRPMSQISGVKKLMHSSSLTNSSIPRFGVKTEQEDVLAKELEDVNKWGLHVFRIAELSGNRPLTVIMHTIFQERDLLKTFKIPVDTLITYLMTLEDHYHADVAYHNNIHAADVVQSTHVLLSTPALEAVFTDLEILAAIFASAIHDVDHPGVSNQFLINTNSELALMYNDSSVLENHHLAVGFKLLQEENCDIFQNLTKKQRQSLRKMVIDIVLATDMSKHMNLLADLKTMVETKKVTSSGVLLLDNYSDRIQVLQNMVHCADLSNPTKPLQLYRQWTDRIMEEFFRQGDRERERGMEISPMCDKHNASVEKSQVGFIDYIVHPLWETWADLVHPDAQDILDTLEDNREWYQSTIPQSPSPAPDDPEEGRQGQTEKFQFELTLEEDGESDTEKDSGSQVEEDTSCSDSKTLCTQDSESTEIPLDEQVEEEAVGEEEESQPEACVIDDRSPDT

SEQ ID NO: 9 - protein, 585 aa, Homo sapiens
MKEQPSCAGTGHPSMAGYGRMAPFELASGPVKRLRTESPFPCLFAEEAYQKLASETLEELDWCLDQLETLQTRHSVSEMASNKFKRMLNRELTHLSEMSRSGNQVSEFISNTFLDKQHEVEIPSPTQKEKEKKKRPMSQISGVKKLMHSSSLTNSSIPRFGVKTEQEDVLAKELEDVNKWGLHVFRIAELSGNRPLTVIMHTIFQERDLLKTFKIPVDTLITYLMTLEDHYHADVAYHNNIHAADVVQSTHVLLSTPALEAVFTDLEILAAIFASAIHDVDHPGVSNQFLINTNSELALMYNDSSVLENHHLAVGFKLLQEENCDIFQNLTKKQRQSLRKMVIDIVLATDMSKHMNLLADLKTMVETKKVTSSGVLLLDNYSDRIQVLQNMVHCADLSNPTKPLQLYRQWTDRIMEEFFRQGDRERERGMEISPMCDKHNASVEKSQVGFIDYIVHPLWETWADLVHPDAQDILDTLEDNREWYQSTIPQSPSPAPDDPEEGRQGQTEKFQFELTLEEDGESDTEKDSGSQVEEDTSCSDSKTLCTQDSESTEIPLDEQVEEEAVGEEEESQPEACVIDDRSPDT

SEQ ID NO: 10 - protein, 507 aa, Homo sapiens
MASNKFKRMLNRELTHLSEMSRSGNQVSEFISNTFLDKQHEVEIPSPTQKEKEKKKRPMSQISGVKKLMHSSSLTNSSIPRFGVKTEQEDVLAKELEDVNKWGLHVFRIAELSGNRPLTVIMHTIFQERDLLKTFKIPVDTLITYLMTLEDHYHADVAYHNNIHAADVVQSTHVLLSTPALEAVFTDLEILAAIFASAIHDVDHPGVSNQFLINTNSELALMYNDSSVLENHHLAVGFKLLQEENCDIFQNLTKKQRQSLRKMVIDIVLATDMSKHMNLLADLKTMVETKKVTSSGVLLLDNYSDRIQVLQNMVHCADLSNPTKPLQLYRQWTDRIMEEFFRQGDRERERGMEISPMCDKHNASVEKSQVGFIDYIVHPLWETWADLVHPDAQDILDTLEDNREWYQSTIPQSPSPAPDDPEEGRQGQTEKFQFELTLEEDGESDTEKDSGSQVEEDTSCSDSKTLCTQDSESTEIPLDEQVEEEAVGEEEESQPEACVIDDRSPDT

SEQ ID NO: 11 - DNA, 483 bp, Homo sapiens
atagttggcgtaccctgaggcctgccagttcctgccttaatgcatatgtagtcgtaattgagttctgacacggccttggatgtttctgtcctaaatagctgacattgcatcttcaagactgtcattccagttggcttttgagtggatacgtgcagtgagatcattgacactggaaacactagttcccattttaattacttaaaacaccacgatgaaaagaaatacctgtgatttgctttctcggagcaaaagtgcctctgaggaaacactacattccagtaatgaagaggaagaccctttccgcggaatggaaccctatcttgtccggagactttcatgtcgcaatattcagcttccccctctcgccttcagacagttggaacaagctgacttgaaaagtgaatcagagaacattcaacgaccaaccagcctccccctgaagattctgccgctgattgctatcacttctgcagaatccagtgg

SEQ ID NO: 12 - protein, 90 aa, Homo sapiens
MKRNTCDLLSRSKSASEETLHSSNEEEDPFRGMEPYLVRRLSCRNIQLPPLAFRQLEQADLKSESENIQRPTSLPLKILPLIAITSAESS

SEQ ID NO: 13 - DNA, 782 bp, Homo sapiens
ttctcactgccctgcggtgttttgaactgccttcttacagacgtcatacagcccttgaggaatagtttctgcctggtgagattgaatgatagttctcattcacaaaaccctggattctaagcagggacacacagaaattactttcgcaggtaaatcagcccacccagccaaagtgtggagagatttgttccttggctgacttctttgctccacggagaggagtgttttcctgtgcttgccctgaaatggaacttccttgacagctctcccgtgttacagtacctcccggtcattttctttttctctctctctacctgcgctcttcgagtgtcagaaacctttaaagctgttactatggaattgcaaaaaagagatcaagtgactctttcactatgctggtttcccttgtgacccagatgaagaatcaattcagaattcagttcctcccttggcattgcaagacacagaagaaactgtcacttcctaacagcctagtactggagtaaattcagtatgaaggaagaaagcgctcctgcgtgttagaaccttgcccatgagctggaccgaggacaggagatggactccaggaaaattggatttcttcaagcagcctcccttggaaatggaatatctttaaaatcttctttgcagaaagacagttagaatgtattaatcagaatagttgaagacttattttcctttttattttttttcaaaatgagcattattatgaagccaagatcccgatctacaagttccctaaggactgcagaggcagtttg

SEQ ID NO: 14 - protein, 21 aa, Homo sapiens
MSIIMKPRSRSTSSLRTAEAV

SEQ ID NO: 15 - DNA, 16 bp, Homo sapiens
agcctttgggccaaca

SEQ ID NO: 16 - DNA, 25 bp, Homo sapiens
caaaccaacaggagtatgtactttt

SEQ ID NO: 17 - DNA, 25 bp, Homo sapiens
aaatgaatggtagatttaacctgag

SEQ ID NO: 18 - DNA, 20 bp, Homo sapiens
tgggaaaataaatacatgcg

SEQ ID NO: 19 - DNA, 25 bp, Homo sapiens
ttataccaggagagtagactttttt

SEQ ID NO: 20 - DNA, 23 bp, Homo sapiens
catgctaatttcaaatatgagag

SEQ ID NO: 21 - DNA, 17 bp, Homo sapiens
gcatttgtcatgtgcca

SEQ ID NO: 22 - DNA, 22 bp, Homo sapiens
ggtatttcattcacagccagtc

SEQ ID NO: 23 - DNA, 20 bp, Homo sapiens
ttaaaggagtgatctccccc

SEQ ID NO: 24 - DNA, 23 bp, Homo sapiens
gttacagtacctatggtcatgcc

SEQ ID NO: 25 - DNA, 19 bp, Homo sapiens
gcactgtgaatttcaaatg

SEQ ID NO: 26 - DNA, 16 bp, Homo sapiens
gtcaggggactgggat

SEQ ID NO: 27 - DNA, 25 bp, Homo sapiens
cctgtaaacaatgaaaacccactga

SEQ ID NO: 28 - DNA, 23 bp, Homo sapiens
agactatgctgtgtgtgtgcctg

SEQ ID NO: 29 - DNA, 21 bp, Homo sapiens
tctgggtttacaaccttcaaa

SEQ ID NO: 30 - DNA, 16 bp, Homo sapiens
taactggcttggcccg

SEQ ID NO: 31 - DNA, 25 bp, Homo sapiens
cagtaaatagtttgcttcaggcatt

SEQ ID NO: 32 - DNA, 20 bp, Homo sapiens
ctcatactctgcgtggcttg

SEQ ID NO: 33 - DNA, 20 bp, Homo sapiens
agggctaagtggatcacagc

SEQ ID NO: 34 - DNA, 20 bp, Homo sapiens
agagggtcttgccactgtgt

SEQ ID NO: 35 - DNA, 20 bp, Homo sapiens
tctgcaagactctcggtgct

SEQ ID NO: 36 - DNA, 24 bp, Homo sapiens
tgcagatctcatatttccatgttt

SEQ ID NO: 37 - DNA, 20 bp, Homo sapiens
tctgccctttgttcctcatc

SEQ ID NO: 38 - DNA, 20 bp, Homo sapiens
gtcaagggagtgatggcagt

SEQ ID NO: 39 - DNA, 20 bp, Homo sapiens
aaaatgactgcctcccacaa

SEQ ID NO: 40 - DNA, 20 bp, Homo sapiens
gggaaatcatactgccctca

SEQ ID NO: 41 - DNA, 20 bp, Homo sapiens
aaacatagccaccctgttgc

SEQ ID NO: 42 - DNA, 22 bp, Homo sapiens
tccaaagcccttagcttaatca

SEQ ID NO: 43 - DNA, 20 bp, Homo sapiens
gctccctggactgtggtaaa

SEQ ID NO: 44 - DNA, 20 bp, Homo sapiens
gccacattgctgtcacattt

SEQ ID NO: 45 - DNA, 20 bp, Homo sapiens
tttttcagggctgggtagaa

SEQ ID NO: 46 - DNA, 22 bp, Homo sapiens
tccaaaggaagtgaaatcagtg

SEQ ID NO: 47 - DNA, 20 bp, Homo sapiens
ctaacccatcctcacccaat

SEQ ID NO: 48 - DNA, 20 bp, Homo sapiens
tgtggcatacagggaagtga

SEQ ID NO: 49 - DNA, 20 bp, Homo sapiens
gtgctggaatttggctccta

SEQ ID NO: 50 - DNA, 20 bp, Homo sapiens
caaacatcattttgccttgc

SEQ ID NO: 51 - DNA, 20 bp, Homo sapiens
tcccaaacgatagctgttgc

SEQ ID NO: 52 - DNA, 20 bp, Homo sapiens
gaattaggacggtggctcaa

SEQ ID NO: 53 - DNA, 21 bp, Homo sapiens
tttgcattcatcactcattcg

SEQ ID NO: 54 - DNA, 20 bp, Homo sapiens
cccgtagcatctgatccagt

SEQ ID NO: 55 - DNA, 20 bp, Homo sapiens
agaaagcttcccctccactg

SEQ ID NO: 56 - DNA, 20 bp, Homo sapiens
cattccagcctgagctacaa

SEQ ID NO: 57 - DNA, 20 bp, Homo sapiens
tgggctccaattatccttcc

SEQ ID NO: 58 - DNA, 20 bp, Homo sapiens
tgcagtttgcactctccttg

SEQ ID NO: 59 - DNA, 21 bp, Homo sapiens
ttatctgttccccatgctttt

SEQ ID NO: 60 - DNA, 25 bp, Homo sapiens
tgttacatcttgatctatgacgttt

SEQ ID NO: 61 - DNA, 20 bp, Homo sapiens
tgtatcctgcatcccttgtt

SEQ ID NO: 62 - DNA, 27 bp, Homo sapiens
ggaataacccaaaagtaattgtagtga

SEQ ID NO: 63 - DNA, 20 bp, Homo sapiens
tcgtgccaagatgaaaatga

SEQ ID NO: 64 - DNA, 21 bp, Homo sapiens
aaacctccctgatcatctgaa

SEQ ID NO: 65 - DNA, 20 bp, Homo sapiens
acagaggagcaaaggaatca

SEQ ID NO: 66 - DNA, 20 bp, Homo sapiens
ttggcacgaatcactctctg

SEQ ID NO: 67 - DNA, 20 bp, Homo sapiens
ccccatttggatgatggtaa

SEQ ID NO: 68 - DNA, 25 bp, Homo sapiens
tgagaacatctaacgtctttttcaa

SEQ ID NO: 69 - DNA, 20 bp, Homo sapiens
ggcacagataactgggaagc

SEQ ID NO: 70 - DNA, 21 bp, Homo sapiens
cccccaaaagtactgcataaa

SEQ ID NO: 71 - DNA, 20 bp, Homo sapiens
atgttggcatttggtgaggt

SEQ ID NO: 72 - DNA, 20 bp, Homo sapiens
cacctgtccctttggaggta

SEQ ID NO: 73 - DNA, 26 bp, Homo sapiens
ttttaaacgtgaaaagtacaagttgc

SEQ ID NO: 74 - DNA, 21 bp, Homo sapiens
acaaagagcacctttccagtg

SEQ ID NO: 75 - DNA, 20 bp, Homo sapiens
tgcttggtgaaggaatagcc

SEQ ID NO: 76 - DNA, 20 bp, Homo sapiens
gagcctgggttctcaggaat

SEQ ID NO: 77 - DNA, 20 bp, Homo sapiens
ggcaagaacagtttggagga

SEQ ID NO: 78 - DNA, 20 bp, Homo sapiens
gactgctgtttgctggttga

SEQ ID NO: 79 - DNA, 24 bp, Homo sapiens
aaatggctataaagtgctttgaac

SEQ ID NO: 80 - DNA, 20 bp, Homo sapiens
cggtctcaacaaccagaaca

SEQ ID NO: 81 - DNA, 24 bp, Homo sapiens
cagaaacacacagaagtcattcaa

SEQ ID NO: 82 - DNA, 21 bp, Homo sapiens
cagacccaattaatggcaaaa

SEQ ID NO: 83 - DNA, 23 bp, Homo sapiens
tctgtcttctttgacccatgaat

SEQ ID NO: 84 - DNA, 20 bp, Homo sapiens
caacacagcgagacctcatc

SEQ ID NO: 85 - DNA, 151 bp, Artificial Sequence
  Amplimer
acaaagagcacctttccagtggacaactaactaaagtggtgtgattttggtataagtttgtgtgtgtgtgtgtgtgtgtgttgtgtgtgtgtgtatgtgtatacatttagttttattgtaacaaagcaacttgtacttttcacgtttaaaa

SEQ ID NO: 86 - DNA, 194 bp, Artificial Sequence
  Amplimer
tgcttggtgaaggaatagccaccccagagaaggagtatggacttctatacacaatcattcattcattcattcattcattcattcattcattcattcactactcatgcatgatctttgtccttatcttcctccactgtcacatgaatacccacccactgcacctacctgcttcctattcctgagaacccaggctc

SEQ ID NO: 87 - DNA, 23 bp, Homo sapiens
ggcaatggaggagttccgggaca

What is claimed is:

1. A method of diagnosing susceptibility to a stroke in an individual, comprising screening for an at-risk haplotype in the phosphodiesterase 4D gene that is more frequently present in an individual susceptible to stroke compared to a healthy individual, wherein the at-risk haplotype increases risk of stroke significantly.

2. The method of claim 1 wherein the significant increase is at least about 20%.

3. The method of claim 1 wherein the significant increase is identified As an odds ratio of at least about 1.2.

4. A method of diagnosing susceptibility to stroke in an individual, comprising screening for an at-risk haplotype in the phosphodiesterase 4D gene that is more frequently present in an individual susceptible to stroke (affected), compared to the frequency of its presence in a healthy individual (control), wherein the presence of the at-risk haplotype is indicative of a susceptibility to stroke.

5. The method of claim 4 wherein the at-risk haplotype is characterized by the presence of at least one single nucleotide polymorphism at nucleic acid positions 1425923, 1415979, 1414804, 1371388, 1307403 and 1257206, relative to SEQ ID NO: 1.

6. The method of claim 5 wherein the at risk haplotype is A C C A T G at nucleic acid positions 1425923, 1415979, 1414804, 1371388, 1307403 and 1257206, respectively, of SEQ ID NO: 1.

7. The method of claim 4 wherein the at-risk haplotype is characterized by the presence of at least one single nucleotide polymorphism and micro satellite marker at nucleic acid positions 263539, 252772, 189780, 175259, 171240, 136550 and 120628, relative to SEQ ID NO: 1.

8. The method of claim 7 wherein the at-risk haplotype is T T G C 0 0 0 at nucleic acid positions 263539, 252772, 189780, 175259, 171240, 136550 and 120628, respectively, of SEQ ID NO: 1.

9. The method of claim 4 wherein the at-risk haplotype is characterized by the presence of at least one single nucleotide polymorphism at nucleic acid positions 138806, 131865, 129361, 120628 and 91470, relative to SEQ ID NO: 1.

10. The method of claim 9 wherein the at risk haplotype is A A C A A at nucleic acid positions 138806, 131865, 129361, 120628 and 91470, respectively, of SEQ ID NO: 1.

11. The method of claim 4 wherein screening for the presence of an at-risk haplotype in the phosphodiesterase 4D gene comprises enzymatic amplification of nucleic acid from said individual.

12. The method of claim 11 wherein the nucleic acid is DNA.

13. The method of claim 12 wherein the DNA is mammalian.

14. The method of claim 13 wherein the DNA is human.

15. The method of claim 4 wherein screening for the presence of an at-risk haplotype in the phosphodiesterase 4D gene comprises:
(a) obtaining material containing nucleic acid from the individual;
(b) amplifying said nucleic acid; and
(c) determining the presence or absence of an at-risk haplotype in said amplified nucleic acid.

16. The method of claim 15 wherein determining the presence of an at-risk haplotype is performed by electrophoretic analysis.

17. The method of claim 15 wherein determining the presence of an at-risk haplotype is performed by restriction length polymorphism analysis.

18. The method of claim 15 wherein determining the presence of an at-risk haplotype is performed by sequence analysis.

19. The method of claim 15 wherein determining the presence of an at-risk haplotype is performed by hybridization analysis.

20. A kit for diagnosing susceptibility to stroke in an individual comprising:
primers for nucleic acid amplification of a region of the phosphodiesterase 4D gene comprising an at-risk haplotype.

21. The kit of claim 20 wherein the primers comprise a segment of nucleic acids of length suitable for nucleic acid amplification, selected from the group consisting of: single nucleotide polymorphism at nucleic acid position 1425923, 1415979, 1414804, 1371388 and 1307403, relative to SEQ ID NO: 1 and combinations thereof.

22. The kit of claim 20 wherein the primers comprise a segment of nucleic acids of length suitable for nucleic acid amplification, selected from the group consisting of: single nucleotide polymorphism or microsatellite marker at nucleic acid position 263539, 252772, 189780, 175259, 171240, 136550 and 120628, relative to SEQ ID NO: 1 and combinations thereof.

23. The kit of claim 20 wherein the primers comprise a segment of nucleic acids of length suitable for nucleic acid amplification, selected from the group consisting of: single nucleotide polymorphism at nucleic acid position 138806, 131865, 129361, 120628 and 91470, relative to SEQ ID NO: 1 and combinations thereof.

24. A method for assessing susceptibility to stroke in an individual, comprising determining PDE4D isoform expression levels in the individual compared to control, wherein a difference in isoform expression is indicative of susceptibility to stroke.

25. The method of claim 24 wherein isoform PDE4D7A and/or PDE4D9 expression is determined.

26. A method of diagnosing a susceptibility to stroke, comprising detecting an alteration in the expression or composition of a polypeptide encoded by phosphodiesterase 4D gene in a test sample, in comparison with the expression or composition of a polypeptide encoded by phosphodiesterase 4D gene in a control sample, wherein the presence of an alteration in expression or composition of the polypeptide in the test sample is indicative of a susceptibility to stroke.

27. The method of claim 26, wherein the alteration in the expression or composition of a polypeptide encoded by phosphodiesterase 4D gene comprises expression of a splicing variant polypeptide in a test sample that differs from a splicing variant polypeptide expressed in a control sample.

28. A method for preventing the occurrence of stroke in an individual in need thereof, comprising regulating a PDE4D isoform level compared to control, whereby the regulated isoform level mimics the level in a healthy individual.

29. The method of claim 28 wherein isoform level is regulated by regulating expression of the isoform using a phosphodiesterase 4D gene binding agent, a phosphodiestase 4D gene receptor, a peptidomimetic, a fusion protein, a prodrug, an antibody or a ribozyme.

30. The method of claim 28 wherein the isoform level is controlled by genetically altering the isoform's expression level.

31. The method of claim 28 wherein the isoform level is regulated by altering the ratio of isoforms.

32. The method of claim 28 wherein isoform PDE4D7A and/or PDE4D9 is regulated.

33. A method for monitoring the effectiveness of treatment on the regulation of expression of one or more PDE4D isoforms at the RNA or protein level, or its enzymatic activity by measuring PDE4D message or protein or enzymatic activity in a sample of peripheral blood or cells derived thereof.

34. A method for predicting the effectiveness of a given therapeutic for stroke prevention or treatment in a given individual comprising screening for the presence or absence of the stroke at-risk haplotype in the phosphodiesterase 4D gene.

35. A method for predicting the effectiveness of a given therapeutic for stroke prevention or treatment in a given individual comprising screening for the expression of one or more PDE4D isoforms at the RNA or protein level, or its enzymatic activity by measuring PDE4D message or protein or enzymatic activity in a sample of peripheral blood or cells derived thereof.
